(19) United States
(12) Patent Application Publication
(10) Pub. No.: US 2013/0160165 A1
(43) Pub. Date: Jun. 20, 2013

(54) Plants Having Enhanced Yield-Related Traits and Method for Making the Same

(71) Applicants: Christophe Reuzeau, La Chapelle Gonaguet (FR); Steven Vandenabeele, Oudenaarde (BE); Valerie Frankard, Waterloo (BE)

(72) Inventors: Christophe Reuzeau, La Chapelle Gonaguet (FR); Steven Vandenabeele, Oudenaarde (BE); Valerie Frankard, Waterloo (BE)

(73) Assignee: BASF Plant Science Company BmbH, Ludwigshafen (DE)

(21) Appl. No.: 13/805,857

(22) PCT Filed: Jun. 21, 2011
(86) PCT No.: PCT/IB11/52699

§ 371 Date: Dec. 20, 2012

Related U.S. Application Data
(60) Provisional application No. 61/358,028, filed on Jun. 24, 2010.
(60) Provisional application No. 61/364,824, filed on Jul. 16, 2010.
(60) Provisional application No. 61/411,972, filed on Nov. 10, 2010.

(51) Int. Cl. C12N 15/82

(52) U.S. Cl. CPC C12N 15/8262
USPC 800/290; 800/298; 435/419; 435/320.1; 800/320.2; 800/320.1; 800/320.3; 800/320; 536/23.6; 530/370

(57) ABSTRACT

The present invention relates generally to the field of molecular biology and to the methods for enhancing various economically important yield-related traits in plants. More specifically, the present invention relates to a method for enhancing yield-related traits in plants by modulating expression of a nucleic acid encoding an OsRSZ33 RRM polypeptide or a growth-related protein (GRP) having at least 25% amino acid sequence identity to SEQ ID NO:251 or a ZPR polypeptide. The present invention also relates to plants having modulated expression of a nucleic acid encoding an OsRSZ33 RRM polypeptide or a growth-related polypeptide as defined herein or a ZPR polypeptide. Such plants have enhanced yield-related traits relative to controls. The invention also provides hitherto unknown OsRSZ33 RRM-encoding nucleic acids or GRP-encoding nucleic acids or a ZPR polypeptide, and constructs comprising the same, which are useful in performing the methods of the invention.

[0001] The present invention relates generally to the field of molecular biology and concerns a method for enhancing various economically important yield-related traits in plants by modulating expression in a plant of a nucleic acid encoding i) an OsRSZ33 RRM polypeptide, an orthologue of atRSZ33 or ii) a growth-related protein (GRP) having at least 25% amino acid sequence identity to SEQ ID NO: 251 or iii) a LITTLE ZIPPER (ZPR) polypeptide. The present invention also concerns plants having modulated expression of a nucleic acid encoding an OsRSZ33 RRM polypeptide or a growth-related protein (GRP) having at least 25% amino acid sequence identity to SEQ ID NO: 251 or a ZPR polypeptide, which plants have enhanced yield-related traits relative to corresponding wild type plants or other control plants. The invention also provides constructs useful in the methods of the invention or hitherto unknown GRP-encoding nucleic acids or ZPR-encoding nucleic acids, and constructs comprising the same, useful in performing the methods of the invention.

[0002] The ever-increasing world population and the dwindling supply of arable land available for agriculture fuels research towards increasing the efficiency of agriculture. Conventional means for crop and horticultural improvements utilise selective breeding techniques to identify plants having desirable characteristics. However, such selective breeding techniques have several drawbacks, namely that these techniques are typically labour intensive and result in plants that often contain heterogeneous genetic components that may not always result in the desirable trait being passed on from parent plants. Advances in molecular biology have allowed mankind to modify the germplasm of animals and plants. Genetic engineering of plants entails the isolation and manipulation of genetic material (typically in the form of DNA or RNA) and the subsequent introduction of that genetic material into a plant. Such technology has the capacity to deliver crops or plants having various improved economic, agronomic or horticultural traits.

[0003] A trait of particular economic interest is increased yield. Yield is normally defined as the measurable produce of economic value from a crop. This may be defined in terms of quantity and/or quality. Yield is directly dependent on several factors, for example, the number and size of the organs, plant architecture (for example, the number of branches), seed production, leaf senescence and more. Root development, nutrient uptake, stress tolerance and early vigour may also be important factors in determining yield. Optimizing the abovementioned factors may therefore contribute to increasing crop yield.

[0004] Seed yield is a particularly important trait, since the seeds of many plants are important for human and animal nutrition. Crops such as corn, rice, wheat, canola and soybean account for over half the total human caloric intake, whether through direct consumption of the seeds themselves or through consumption of meat products raised on processed seeds. They are also a source of sugars, oils and many kinds of metabolites used in industrial processes. Seeds contain an embryo (the source of new shoots and roots) and an endosperm (the source of nutrients for embryo growth during germination and during early growth of seedlings). The development of a seed involves many genes, and requires the transfer of metabolites from the roots, leaves and stems into the growing seed. The endosperm, in particular, assimilates the metabolic precursors of carbohydrates, oils and proteins and synthesizes them into storage macromolecules to fill out the grain.

[0005] Another important trait for many crops is early vigour. Improving early vigour is an important objective of modern rice breeding programs in both temperate and tropical rice cultivars. Long roots are important for proper soil anchorage in water-seeded rice. Where rice is sown directly into flooded fields, and where plants must emerge rapidly through water, longer shoots are associated with vigour. Where drill-seeding is practiced, longer mesocotyls and coleoptiles are important for good seedling emergence. The ability to engineer early vigour into plants would be of great importance in agriculture. For example, poor early vigour has been a limitation to the introduction of maize (Zea mays L.) hybrids based on Corn Belt germplasm in the European Atlantic.

[0006] A further important trait is that of improved abiotic stress tolerance. Abiotic stress is a primary cause of crop loss worldwide, reducing average yields for most major crop plants by more than 50% (Wang et al., Planta 218, 1-14, 2003). Abiotic stresses may be caused by drought, salinity, extremes of temperature, chemical toxicity and oxidative stress. The ability to improve plant tolerance to abiotic stress would be of great economic advantage to farmers worldwide and would allow for the cultivation of crops during adverse conditions and in territories where cultivation of crops may not otherwise be possible.

[0007] Crop yield may therefore be increased by optimising one of the above-mentioned factors.

[0008] Depending on the end use, the modification of certain yield traits may be favoured over others. For example for applications such as forage or wood production, or bio-fuel resource, an increase in the vegetative parts of a plant may be desirable, and for applications such as flour, starch or oil production, an increase in seed parameters may be particularly desirable. Even amongst the seed parameters, some may be favoured over others, depending on the application. Various mechanisms may contribute to increasing seed yield, whether that is in the form of increased seed size or increased seed number.

[0009] One approach to increasing yield (seed yield and/or biomass) in plants may be through modification of the inherent growth mechanisms of a plant, such as the cell cycle or various signalling pathways involved in plant growth or in defense mechanisms.

[0010] It has now been found that various yield-related traits may be improved in plants by modulating expression in a plant of a nucleic acid encoding an OsRSZ33 RRM polypeptide as defined herein or a growth-related polypeptide as defined herein or a ZPR polypeptide as defined herein.

### BACKGROUND

[0011] Pre-mRNA processing to mRNA requires, in addition to the spliceosome, the activity of a large number of proteins. Many of these proteins, known as SR proteins and SR-related proteins, contain so called RS-domains rich in alternating Arg and Ser residues. Some of these proteins are involved in RNA splicing, others are needed for 3′ end formation of mRNA or for export. Splicing (and alternative splicing) is a common step in the formation in mRNA and allows regulation of gene expression by selection of alternative splice sites in the pre-mRNA, thereby generating multiple protein isoforms or variants. An overview of SR proteins and their activities in plants is given in Barta et al. (Curr. Top. Microbiol. Immunol. 326, 83-102, 2008).

[0012] Some of the SR proteins are unique to plants, for example several of the 19 SR proteins encoded in the Arabidopsis genome have no orthologues in metazoan (Kalyna et al., Nucleic Acids Res. 34, 4395-4405, 2006). One of these, atRSZ33, acts as a splicing factor for atSRp30 and atSRp34/SR1 (Kalyna et al., Mol Biol. Cell, 14, 3565-3577, 2003). atRSZ33 comprises an RNA recognition motif (RRM), two zinc knuckles embedded in a basic RS region and an acidic C-terminal domain (Lopato et al., J. Biol. Chem. 277, 39989-39998, 2002). It was postulated that its main activity is in spliceosome assembly, and that both zinc knuckles and part of the RS and the RRM domain are needed for protein-protein interaction (Lopato et al. 2002).

[0013] Expression of atRSZ33 cDNA under control of the 35S promoter in Arabidopsis caused pleiotropic changes in plant development resulting in increased cell expansion and changed polarisation of cell elongation and division resulting in abnormal and sterile plants. Expression of rice RS proteins in rice reportedly did not influence plant growth in general (Isshiki et al., Plant Cell 18, 146-148, 2006).

[0014] In accordance with the present invention, it has been found that modulating the expression of genes that are involved in stress responses in plants may lead to plants having enhanced yield-related traits, in particular plants having increased yield such as but not limited to increased seed yield and increased biomass, relative to control plants.

[0015] Stress conditions trigger a wide range of plant responses, including altered gene expression and changes of cellular metabolism. A stress response is usually initiated when plants recognizes stress at the cellular level. Stress recognition activates signal transduction pathways that transmit information within the individual cell and throughout the plant.

[0016] Chakrabarty et al. (2009, Chemosphere 74: 688-702) for instance describe comparative transcriptome analysis of arsenate and arsenite stresses in rice seedlings. The authors studied the effect of arsenic (As) exposure on genome-wide expression was examined in rice (Oryza sativa L., ssp. Indica). A group of defense and stress-responsive genes, transporters, heat-shock proteins, metallothioneins, sulfate-metabolizing proteins, and regulatory genes showed differential expression in rice seedlings challenged with arsenate (AsV) and arsenite (AsIII). AsV stress led to upregulation or downregulation of an additional set of genes in comparison to AsIII.

[0017] Reactive oxygen species (ROS) are key players in the regulation of plant development, stress responses, and programmed cell death. Previous studies indicated that depending on the type of ROS (hydrogen peroxide, superoxide, or singlet oxygen) or its subcellular production site (plastidic, cytosolic, peroxisomal, or apoplastic), a different physiological, biochemical, and molecular response is provoked. Plants are especially susceptible to oxidative damage, since the production of ROS is increased during stresses imposed by the environment such as extremes of temperature, suboptimal water availability and pollution. Plants have, therefore, evolved a dynamic network of antioxidant defenses that serve to reduce the accumulation of ROS, to detoxify ROS, and to detoxify and repair oxidized molecules. Studies on the role of ROS signalling in stress responses and plant responses thereon are ongoing.

[0018] For instance, Gadjev et al. (2006, Plant Physiology, 141:436-445) used transcriptome data generated from ROS-related microarray experiments to assess the specificity of ROS-driven transcript expression. Data sets obtained by exogenous application of oxidative stress-causing agents (methyl viologen, Alternaria alternata toxin, 3-aminotriazole, and ozone) and from a mutant (fluorescent) and transgenic plants, in which the activity of an individual antioxidant enzyme was perturbed (catalase, cytosolic ascorbate peroxidase, and copper/zinc superoxide dismutase), were compared. In total, the abundance of nearly 26,000 transcripts of Arabidopsis (Arabidopsis thaliana) was monitored in response to different ROS. Marker transcripts that were specifically regulated by hydrogen peroxide, superoxide, or singlet oxygen, several transcripts were identified as general oxidative stress response markers because their steady-state levels were at least 5-fold elevated in most experiments. For instance, one transcript, encoding a protein of unknown function (At2g21640), was at least 5-fold elevated in all experiments, except in the KO-Apx1 plants. The authors also inferred new candidate regulatory transcripts that could be responsible for orchestrating the specific transcriptomic signatures triggered by different ROS.

[0019] Sweetlove et al. (2002; Plant Journal, 32:891:904) have studied the impact of oxidative stress on Arabidopsis mitochondria and conclude that differences between stress treatments have implications for the nature of the integration of stress responses between plant cell compartments. The authors present a survey of the impact of oxidative stress on the protein composition and function of plant mitochondria. They showed that stress has a significant effect on the mitochondrial proteome leading to the degradation of a number of key proteins. Using 2D gel electrophoresis in combination with MS/MS the authors were also able to identify new, inducible components of the mitochondrial antioxidant system, amongst which stress-responsive genes, At2g21640. They also demonstrated that mitochondrial function is negatively affected by oxidative stress in a manner that will have implications across the cell, and that plant mitochondria utilize a number of antioxidant enzymes to scavenge and detoxify ROS to ameliorate this oxidative damage.

[0020] Ho et al. (Plant Physiology, 147:1858-1873, 2008) have studied transcript abundance and promoters of genes encoding mitochondrial proteins to identify signaling pathways that regulate stress-induced gene expression. In their study they used Arabidopsis alternative oxidase AOX1a, external NADP H-dehydrogenase NDB2, and two additional highly stress-responsive genes, At2g21640 and BCS1. Analysis of transcript abundance of these genes in a variety of defense signaling mutants confirmed that BCS1 expression is regulated in a different manner compared to AOX1a, NDB2, and At2g21640. According to the authors, at least three distinctive pathways regulate mitochondrial stress response at a transcriptional level, an SA-dependent pathway represented by BCS1, a second pathway that represents a convergence point for signals generated by H(2)O(2) and rotenone on multiple CAREs, and a third pathway that acts via EDS1 and PAD4 regulating only AOX1a.

[0021] In Arabidopsis, according to Jun et al. (Plant Signaling & Behavior 3:9, 615-617; 2008) ZPR proteins were identified by two independent groups as a group of genes encoding proteins with small molecular sizes that are composed of 67-100 residues in Arabidopsis (Wenkel et al. The Plant Cell, Vol. 19: 3379-3390, 2007; and, Kim et al. The Plant Cell, Vol. 20: 920-933, 2008).

[0022] Wenkel et al. (2007) described this small family of plant-specific LITTLE ZIPPER (ZPR) genes that encode small proteins (67 to 105 amino acids long) and that include a stretch of leucine zipper motifs. This stretch of leucine zipper is approximately six heptads in length and is similar to the leucine zipper found in the class III homeodomain-leucine zipper (HD-ZIPIII) proteins. Class III homeodomain-leucine zipper (HD-ZIPIII) proteins are conserved plant proteins that act as potent regulators of ad/abaxial polarity in Arabidosis. HD-ZIPIII protein activity promotes the development of adaxial leaf fates and meristem formation; in its absence, lower abaxial leaf fates develop and meristems fail to form.

[0023] Wenkel et al. (2007) reported that LITTLE ZIPPER (ZPR) genes are transcriptionally upregulated by HD-ZIPIII activity. Wenkel et al. (2007) further described that the structural features of the ZPR proteins, and their induction by HD-ZIPIII activity, suggest a model for the action of the ZPR genes as part of a negative feedback loop on HD-ZIPIII function. In the regulatory module proposed by Wenkel et al. (2007), HD-ZIPIII proteins activate transcription of the ZPR genes. The ZPR proteins then form heterodimers with the HD-ZIPIII proteins, preventing or altering their DNA binding.

[0024] Kim et al. (2008) demonstrated that a small ZIP protein, ZPR3, and its functionally redundant homolog, ZPR4, negatively regulate the HD-ZIP III activity in Shoot apical meristem (SAM) development. ZPR3 directly interacts with PHABULOSA (PHB) and other HD-ZIP III proteins via the ZIP motifs and forms nonfunctional heterodimers. In view thereof, Kim et al. (2008) proposed that HD-ZIPIII activity in regulating SAM is modulated by, among other things, a feedback loop involving the competitive inhibitors ZPR3 and ZPR4.

[0025] Transgenic Arabidopsis plants overexpressing ZPR genes have been described in literature (see e.g. Wenkel et al. 2007; Kim et al. 2008). For instance, Wenkel et al. (2007) described transgenic Arabidopsis plants that overexpress the Arabidopsis ZPR1 gene or the Arabidopsis ZPR3 gene. The authors of this paper showed that when overexpressed, the ZPR1 and ZPR3 proteins cause abaxialization consistent with inhibition of HD-ZIPIII function. ZPR3 causes a stronger phenotype, in some cases resulting in the production of a rod-shaped leaf that terminates the shoot apical meristem.

[0026] Phylogenetic analysis revealed that ZPR proteins can be classified into two distinct groups: one including ZPR1 and ZPR2 and the other including ZPR3 and ZPR4 (Wenkel et al., 2007). The two groups are distinct in their molecular sizes and the location of the ZIP motifs within the proteins. ZPR1 and ZPR2 (93 and 105 residues, respectively) are larger than ZPR3 and ZPR4 (67 and 72 residues, respectively) mainly because ZPR1 and ZPR2 have N-terminal extensions. Kim et al. (2008) described that this structural distinction, together with the phenotypes of the mutant and transgenic Arabidopsis plants with altered ZPR expressions (Wenkel et al., 2007; Kim et al. 2008), support the idea that, whereas ZPR3 and ZPR4 play a role principally in the SAM development, ZPR1 and ZPR2 are more closely linked to the patterning of leaf polarity.

### SUMMARY

[0027] Surprisingly, it has now been found that modulating expression of a nucleic acid encoding OsRSZ33 RRM, an orthologue of atRSZ33 (Arabidopsis thaliana RS-containing Zinc knuckle protein with a molecular mass of 33 kDa, Lopato et al. 2002) and also known as RSZ36 (Isshiki et al., 2006) or a growth-related polypeptide (GRP) or a ZPR polypeptide as defined herein, gives plants having enhanced yield-related traits, in particular increased yield relative to control plants, such as but not limited to increased seed yield and increased biomass relative to control plants.

[0028] According one embodiment, there is provided a method for improving yield-related traits in plants relative to control plants, in particular yield, and more particularly seed yield in plants relative to control plants, comprising modulating expression in a plant of a nucleic acid encoding an OsRSZ33 RRM polypeptide or a growth-related polypeptide (GRP) or ZPR polypeptide as defined herein.

[0029] The section captions and headings in this specification are for convenience and reference purpose only and should not affect in any way the meaning or interpretation of this specification.

### DEFINITIONS

[0030] The following definitions will be used throughout the present specification.

### Polypeptide(s)/Protein(s)

[0031] The terms “polypeptide” and “protein” are used interchangeably herein and refer to amino acids in a polymeric form of any length, linked together by peptide bonds.

### Polynucleotide(s)/Nucleic Acid(s)/Nucleic Acid Sequence(s)/Nucleotide Sequence(s)

[0032] The terms “polynucleotide(s)”, “nucleic acid sequence(s)”, “nucleotide sequence(s)”, “nucleic acid(s)”, “nucleic acid molecule” are used interchangeably herein and refer to nucleotides, either ribonucleotides or deoxyribonucleotides or a combination of both, in a polymeric unbranched form of any length.

### Homologue(s)

[0033] “Homologues” of a protein encompass peptides, oligopeptides, polypeptides, proteins and enzymes having amino acid substitutions, deletions and/or insertions relative to the unmodified protein in question and having similar biological and functional activity as the unmodified protein from which they are derived.

[0034] A deletion refers to removal of one or more amino acids from a protein.

[0035] An insertion refers to one or more amino acid residues being introduced into a predetermined site in a protein. Insertions may comprise N-terminal and/or C-terminal fusions as well as intra-sequence insertions of single or multiple amino acids. Generally, insertions within the amino acid sequence will be smaller than N- or C-terminal fusions, of the order of about 1 to 10 residues. Examples of N- or C-terminal fusion proteins or peptides include the binding domain or activation domain of a transcriptional activator as used in the yeast two-hybrid system, phage coat proteins, (histidine)-6-tag, glutathione S-transferase-tag, protein A, maltose-binding protein, dihydrofolate reductase, Tag•100 epitope, c-myc epitope, FLAG®-epitope, lacZ, CMP (calmodulin-binding peptide), HA epitope, protein C epitope and VSV epitope.

[0036] A substitution refers to replacement of amino acids of the protein with other amino acids having similar properties (such as similar hydrophobicity, hydrophilicity, antigenicity, propensity to form or break α-helical structures or β-sheet structures). Amino acid substitutions are typically of single residues, but may be clustered depending upon functional constraints placed upon the polypeptide and may range from 1 to 10 amino acids; insertions will usually be of the order of about 1 to 10 amino acid residues. The amino acid substitutions are preferably conservative amino acid substitutions. Conservative substitution tables are well known in the art (see for example Creighton (1984) Proteins. W.H. Freeman and Company (Eds) and Table 1 below).

TABLE 1
Examples of conserved amino acid substitutions

| Residue | Conservative Substitutions |
|---|---|
| Ala | Ser |
| Arg | Lys |
| Asn | Gln; His |
| Asp | Glu |
| Gln | Asn |
| Cys | Ser |
| Glu | Asp |
| Gly | Pro |
| His | Asn; Gln |
| Ile | Leu, Val |
| Leu | Ile; Val |
| Lys | Arg; Gln |
| Met | Leu; Ile |
| Phe | Met; Leu; Tyr |
| Ser | Thr; Gly |
| Thr | Ser; Val |
| Trp | Tyr |
| Tyr | Trp; Phe |
| Val | Ile; Leu |

[0037] Amino acid substitutions, deletions and/or insertions may readily be made using peptide synthetic techniques well known in the art, such as solid phase peptide synthesis and the like, or by recombinant DNA manipulation. Methods for the manipulation of DNA sequences to produce substitution, insertion or deletion variants of a protein are well known in the art. For example, techniques for making substitution mutations at predetermined sites in DNA are well known to those skilled in the art and include M13 mutagenesis, T7-Gen in vitro mutagenesis (USB, Cleveland, Ohio), QuickChange Site Directed mutagenesis (Stratagene, San Diego, Calif.), PCR-mediated site-directed mutagenesis or other site-directed mutagenesis protocols.

### Derivatives

[0038] “Derivatives” include peptides, oligopeptides, polypeptides which may, compared to the amino acid sequence of the naturally-occurring form of the protein, such as the protein of interest, comprise substitutions of amino acids with non-naturally occurring amino acid residues, or additions of non-naturally occurring amino acid residues. “Derivatives” of a protein also encompass peptides, oligopeptides, polypeptides which comprise naturally occurring altered (glycosylated, acylated, prenylated, phosphorylated, myristoylated, sulphated etc.) or non-naturally altered amino acid residues compared to the amino acid sequence of a naturally-occurring form of the polypeptide. A derivative may also comprise one or more non-amino acid substituents or additions compared to the amino acid sequence from which it is derived, for example a reporter molecule or other ligand, covalently or non-covalently bound to the amino acid sequence, such as a reporter molecule which is bound to facilitate its detection, and non-naturally occurring amino acid residues relative to the amino acid sequence of a naturally-occurring protein. Furthermore, “derivatives” also include fusions of the naturally-occurring form of the protein with tagging peptides such as FLAG, HIS6 or thioredoxin (for a review of tagging peptides, see Terpe, Appl. Microbiol. Biotechnol. 60, 523-533, 2003).

### Orthologue(s)/Paralogue(s)

[0039] Orthologues and paralogues encompass evolutionary concepts used to describe the ancestral relationships of genes. Paralogues are genes within the same species that have originated through duplication of an ancestral gene; orthologues are genes from different organisms that have originated through speciation, and are also derived from a common ancestral gene.

Domain, Motif/Consensus sequence/Signature

[0040] The term “domain” refers to a set of amino acids conserved at specific positions along an alignment of sequences of evolutionarily related proteins. While amino acids at other positions can vary between homologues, amino acids that are highly conserved at specific positions indicate amino acids that are likely essential in the structure, stability or function of a protein. Identified by their high degree of conservation in aligned sequences of a family of protein homologues, they can be used as identifiers to determine if any polypeptide in question belongs to a previously identified polypeptide family.

[0041] The term “motif” or “consensus sequence” or “signature” refers to a short conserved region in the sequence of evolutionarily related proteins. Motifs are frequently highly conserved parts of domains, but may also include only part of the domain, or be located outside of conserved domain (if all of the amino acids of the motif fall outside of a defined domain).

[0042] Specialist databases exist for the identification of domains, for example, SMART (Schultz et al. (1998) Proc. Natl. Acad. Sci. USA 95, 5857-5864; Letunic et al. (2002) Nucleic Acids Res 30, 242-244), InterPro (Mulder et al., (2003) Nucl. Acids. Res. 31, 315-318), Prosite (Bucher and Bairoch (1994), A generalized profile syntax for biomolecular sequences motifs and its function in automatic sequence interpretation. (In) ISMB-94; Proceedings 2nd International Conference on Intelligent Systems for Molecular Biology. Altman R., Brutlag D., Karp P., Lathrop R., Searls D., Eds., pp 53-61, AAAI Press, Menlo Park; Hulo et al., Nucl. Acids. Res. 32:D134-D137, (2004)), or Pfam (Bateman et al., Nucleic Acids Research 30(1): 276-280 (2002)). A set of tools for in silico analysis of protein sequences is available on the ExPASy proteomics server (Swiss Institute of Bioinformatics (Gasteiger et al., ExPASy: the proteomics server for in-depth protein knowledge and analysis, Nucleic Acids Res. 31:3784-3788 (2003)). Domains or motifs may also be identified using routine techniques, such as by sequence alignment.

[0043] Methods for the alignment of sequences for comparison are well known in the art, such methods include GAP, BESTFIT, BLAST, FASTA and TFASTA. GAP uses the algorithm of Needleman and Wunsch ((1970) J Mol Biol 48: 443-453) to find the global (i.e. spanning the complete sequences) alignment of two sequences that maximizes the number of matches and minimizes the number of gaps. The BLAST algorithm (Altschul et al. (1990) J Mol Biol 215: 403-10) calculates percent sequence identity and performs a statistical analysis of the similarity between the two sequences. The software for performing BLAST analysis is publicly available through the National Centre for Biotechnology Information (NCBI). Homologues may readily be identified using, for example, the ClustalW multiple sequence alignment algorithm (version 1.83), with the default pairwise alignment parameters, and a scoring method in percentage. Global percentages of similarity and identity may also be determined using one of the methods available in the MatGAT software package (Campanella et al., BMC Bioinformatics. 2003 Jul. 10; 4:29. MatGAT: an application that generates similarity/identity matrices using protein or DNA sequences.). Minor manual editing may be performed to optimise alignment between conserved motifs, as would be apparent to a person skilled in the art. Furthermore, instead of using full-length sequences for the identification of homologues, specific domains may also be used. The sequence identity values may be determined over the entire nucleic acid or amino acid sequence or over selected domains or conserved motif(s), using the programs mentioned above using the default parameters. For local alignments, the Smith-Waterman algorithm is particularly useful (Smith T F, Waterman M S (1981) J. Mol. Biol 147(1); 195-7).

### Reciprocal BLAST

[0044] Typically, this involves a first BLAST involving BLASTing a query sequence (for example using any of the sequences listed in Tables A, F or J of the Examples section) against any sequence database, such as the publicly available NCBI database. BLASTN or TBLASTX (using standard default values) are generally used when starting from a nucleotide sequence, and BLASTP or TBLASTN (using standard default values) when starting from a protein sequence. The BLAST results may optionally be filtered. The full-length sequences of either the filtered results or non-filtered results are then BLASTed back (second BLAST) against sequences from the organism from which the query sequence is derived. The results of the first and second BLASTs are then compared. A paralogue is identified if a high-ranking hit from the first blast is from the same species as from which the query sequence is derived, a BLAST back then ideally results in the query sequence amongst the highest hits; an orthologue is identified if a high-ranking hit in the first BLAST is not from the same species as from which the query sequence is derived, and preferably results upon BLAST back in the query sequence being among the highest hits.

[0045] High-ranking hits are those having a low E-value. The lower the E-value, the more significant the score (or in other words the lower the chance that the hit was found by chance). Computation of the E-value is well known in the art. In addition to E-values, comparisons are also scored by percentage identity. Percentage identity refers to the number of identical nucleotides (or amino acids) between the two compared nucleic acid (or polypeptide) sequences over a particular length. In the case of large families, ClustalW may be used, followed by a neighbour joining tree, to help visualize clustering of related genes and to identify orthologues and paralogues.

### Hybridisation

[0046] The term “hybridisation” as defined herein is a process wherein substantially homologous complementary nucleotide sequences anneal to each other. The hybridisation process can occur entirely in solution, i.e. both complementary nucleic acids are in solution. The hybridisation process can also occur with one of the complementary nucleic acids immobilised to a matrix such as magnetic beads, Sepharose beads or any other resin. The hybridisation process can furthermore occur with one of the complementary nucleic acids immobilised to a solid support such as a nitro-cellulose or nylon membrane or immobilised by e.g. photolithography to, for example, a siliceous glass support (the latter known as nucleic acid arrays or microarrays or as nucleic acid chips). In order to allow hybridisation to occur, the nucleic acid molecules are generally thermally or chemically denatured to melt a double strand into two single strands and/or to remove hairpins or other secondary structures from single stranded nucleic acids.

[0047] The term “stringency” refers to the conditions under which a hybridisation takes place. The stringency of hybridisation is influenced by conditions such as temperature, salt concentration, ionic strength and hybridisation buffer composition. Generally, low stringency conditions are selected to be about 30° C. lower than the thermal melting point (Tₘ) for the specific sequence at a defined ionic strength and pH. Medium stringency conditions are when the temperature is 20° C. below Tₘ, and high stringency conditions are when the temperature is 10° C. below Tₘ. High stringency hybridisation conditions are typically used for isolating hybridising sequences that have high sequence similarity to the target nucleic acid sequence. However, nucleic acids may deviate in sequence and still encode a substantially identical polypeptide, due to the degeneracy of the genetic code. Therefore medium stringency hybridisation conditions may sometimes be needed to identify such nucleic acid molecules.

[0048] The Tm is the temperature under defined ionic strength and pH, at which 50% of the target sequence hybridises to a perfectly matched probe. The Tₘ is dependent upon the solution conditions and the base composition and length of the probe. For example, longer sequences hybridise specifically at higher temperatures. The maximum rate of hybridisation is obtained from about 16° C. up to 32° C. below Tₘ. The presence of monovalent cations in the hybridisation solution reduce the electrostatic repulsion between the two nucleic acid strands thereby promoting hybrid formation; this effect is visible for sodium concentrations of up to 0.4M (for higher concentrations, this effect may be ignored). Formamide reduces the melting temperature of DNA-DNA and DNA-RNA duplexes with 0.6 to 0.7° C. for each percent formamide, and addition of 50% formamide allows hybridisation to be performed at 30 to 45° C., though the rate of hybridisation will be lowered. Base pair mismatches reduce the hybridisation rate and the thermal stability of the duplexes. On average and for large probes, the Tm decreases about 1° C. per % base mismatch. The Tm may be calculated using the following equations, depending on the types of hybrids:

1) DNA-DNA hybrids (Meinkoth and Wahl, Anal. Biochem., 138: 267-284, 1984):

Tₘ=81.5° C.+16.6×log₁₀[Na⁺]^{a}+0.41×%[G/C^{b}]−500×[L^{c}]⁻¹−0.61×% formamide

2) DNA-RNA or RNA-RNA hybrids:

Tₘ=79.8+18.5(log₁₀[Na⁺]^{a})+0.58(% G/C^{b})+11.8(% G/C^{b})²−820/L^{c}

3) oligo-DNA or oligo-RNAs hybrids:

For <20 nucleotides: Tₘ=2(Iₙ)

For 20-35 nucleotides: Tₘ=22+1.46(Iₙ)
[0049] ^{a} or for other monovalent cation, but only accurate in the 0.01-0.4 M range.
[0050] ^{b} only accurate for % GC in the 30% to 75% range.
[0051] ^{c}L=length of duplex in base pairs.
[0052] ^{d} oligo, oligonucleotide; Iₙ, =effective length of primer=2×(no. of G/C)+(no. of A/T).

[0053] Non-specific binding may be controlled using any one of a number of known techniques such as, for example, blocking the membrane with protein containing solutions, additions of heterologous RNA, DNA, and SDS to the hybridisation buffer, and treatment with Rnase. For non-homologous probes, a series of hybridizations may be performed by varying one of (i) progressively lowering the annealing temperature (for example from 68° C. to 42° C.) or (ii) progressively lowering the formamide concentration (for example from 50% to 0%). The skilled artisan is aware of various parameters which may be altered during hybridisation and which will either maintain or change the stringency conditions.

[0054] Besides the hybridisation conditions, specificity of hybridisation typically also depends on the function of post-hybridisation washes. To remove background resulting from non-specific hybridisation, samples are washed with dilute salt solutions. Critical factors of such washes include the ionic strength and temperature of the final wash solution: the lower the salt concentration and the higher the wash temperature, the higher the stringency of the wash. Wash conditions are typically performed at or below hybridisation stringency. A positive hybridisation gives a signal that is at least twice of that of the background. Generally, suitable stringent conditions for nucleic acid hybridisation assays or gene amplification detection procedures are as set forth above. More or less stringent conditions may also be selected. The skilled artisan is aware of various parameters which may be altered during washing and which will either maintain or change the stringency conditions.

[0055] For example, typical high stringency hybridisation conditions for DNA hybrids longer than 50 nucleotides encompass hybridisation at 65° C. in 1×SSC or at 42° C. in 1×SSC and 50% formamide, followed by washing at 65° C. in 0.3×SSC. Examples of medium stringency hybridisation conditions for DNA hybrids longer than 50 nucleotides encompass hybridisation at 50° C. in 4×SSC or at 40° C. in 6×SSC and 50% formamide, followed by washing at 50° C. in 2×SSC. The length of the hybrid is the anticipated length for the hybridising nucleic acid. When nucleic acids of known sequence are hybridised, the hybrid length may be determined by aligning the sequences and identifying the conserved regions described herein. 1×SSC is 0.15M NaCl and 15 mM sodium citrate; the hybridisation solution and wash solutions may additionally include 5×Denhardt's reagent, 0.5-1.0% SDS, 100 μg/ml denatured, fragmented salmon sperm DNA, 0.5% sodium pyrophosphate.

[0056] For the purposes of defining the level of stringency, reference can be made to Sambrook et al. (2001) Molecular Cloning: a laboratory manual, 3rd Edition, Cold Spring Harbor Laboratory Press, CSH, New York or to Current Protocols in Molecular Biology, John Wiley & Sons, N.Y. (1989 and yearly updates).

### Splice Variant

[0057] The term “splice variant” as used herein encompasses variants of a nucleic acid sequence in which selected introns and/or exons have been excised, replaced, displaced or added, or in which introns have been shortened or lengthened. Such variants will be ones in which the biological activity of the protein is substantially retained; this may be achieved by selectively retaining functional segments of the protein. Such splice variants may be found in nature or may be manmade. Methods for predicting and isolating such splice variants are well known in the art (see for example Foissac and Schiex (2005) BMC Bioinformatics 6: 25).

### Allelic Variant

[0058] Alleles or allelic variants are alternative forms of a given gene, located at the same chromosomal position. Allelic variants encompass Single Nucleotide Polymorphisms (SNPs), as well as Small Insertion/Deletion Polymorphisms (INDELs). The size of INDELs is usually less than 100 bp. SNPs and INDELs form the largest set of sequence variants in naturally occurring polymorphic strains of most organisms.

### Endogenous Gene

[0059] Reference herein to an “endogenous” gene not only refers to the gene in question as found in a plant in its natural form (i.e., without there being any human intervention), but also refers to that same gene (or a substantially homologous nucleic acid/gene) in an isolated form subsequently (re)introduced into a plant (a transgene). For example, a transgenic plant containing such a transgene may encounter a substantial reduction of the transgene expression and/or substantial reduction of expression of the endogenous gene. The isolated gene may be isolated from an organism or may be manmade, for example by chemical synthesis.

### Gene Shuffling/Directed Evolution

[0060] Gene shuffling or directed evolution consists of iterations of DNA shuffling followed by appropriate screening and/or selection to generate variants of nucleic acids or portions thereof encoding proteins having a modified biological activity (Castle et al., (2004) Science 304(5674): 1151-4; U.S. Pat. Nos. 5,811,238 and 6,395,547).

### Construct

[0061] Additional regulatory elements may include transcriptional as well as translational enhancers. Those skilled in the art will be aware of terminator and enhancer sequences that may be suitable for use in performing the invention. An intron sequence may also be added to the 5′ untranslated region (UTR) or in the coding sequence to increase the amount of the mature message that accumulates in the cytosol, as described in the definitions section. Other control sequences (besides promoter, enhancer, silencer, intron sequences, 3′UTR and/or 5′UTR regions) may be protein and/or RNA stabilizing elements. Such sequences would be known or may readily be obtained by a person skilled in the art.

[0062] The genetic constructs of the invention may further include an origin of replication sequence that is required for maintenance and/or replication in a specific cell type. One example is when a genetic construct is required to be maintained in a bacterial cell as an episomal genetic element (e.g. plasmid or cosmid molecule). Preferred origins of replication include, but are not limited to, the f1-ori and colE1.

[0063] For the detection of the successful transfer of the nucleic acid sequences as used in the methods of the invention and/or selection of transgenic plants comprising these nucleic acids, it is advantageous to use marker genes (or reporter genes). Therefore, the genetic construct may optionally comprise a selectable marker gene. Selectable markers are described in more detail in the “definitions” section herein. The marker genes may be removed or excised from the transgenic cell once they are no longer needed. Techniques for marker removal are known in the art, useful techniques are described above in the definitions section.

### Regulatory Element/Control Sequence/Promoter

[0064] The terms “regulatory element”, “control sequence” and “promoter” are all used interchangeably herein and are to be taken in a broad context to refer to regulatory nucleic acid sequences capable of effecting expression of the sequences to which they are ligated. The term “promoter” typically refers to a nucleic acid control sequence located upstream from the transcriptional start of a gene and which is involved in recognising and binding of RNA polymerase and other proteins, thereby directing transcription of an operably linked nucleic acid. Encompassed by the aforementioned terms are transcriptional regulatory sequences derived from a classical eukaryotic genomic gene (including the TATA box which is required for accurate transcription initiation, with or without a CCAAT box sequence) and additional regulatory elements (i.e. upstream activating sequences, enhancers and silencers) which alter gene expression in response to developmental and/or external stimuli, or in a tissue-specific manner. Also included within the term is a transcriptional regulatory sequence of a classical prokaryotic gene, in which case it may include a −35 box sequence and/or −10 box transcriptional regulatory sequences. The term “regulatory element” also encompasses a synthetic fusion molecule or derivative that confers, activates or enhances expression of a nucleic acid molecule in a cell, tissue or organ.

[0065] A “plant promoter” comprises regulatory elements, which mediate the expression of a coding sequence segment in plant cells. Accordingly, a plant promoter need not be of plant origin, but may originate from viruses or micro-organisms, for example from viruses which attack plant cells. The “plant promoter” can also originate from a plant cell, e.g. from the plant which is transformed with the nucleic acid sequence to be expressed in the inventive process and described herein. This also applies to other “plant” regulatory signals, such as “plant” terminators. The promoters upstream of the nucleotide sequences useful in the methods of the present invention can be modified by one or more nucleotide substitution(s), insertion(s) and/or deletion(s) without interfering with the functionality or activity of either the promoters, the open reading frame (ORF) or the 3′-regulatory region such as terminators or other 3′ regulatory regions which are located away from the ORF. It is furthermore possible that the activity of the promoters is increased by modification of their sequence, or that they are replaced completely by more active promoters, even promoters from heterologous organisms. For expression in plants, the nucleic acid molecule must, as described above, be linked operably to or comprise a suitable promoter which expresses the gene at the right point in time and with the required spatial expression pattern.

[0066] For the identification of functionally equivalent promoters, the promoter strength and/or expression pattern of a candidate promoter may be analysed for example by operably linking the promoter to a reporter gene and assaying the expression level and pattern of the reporter gene in various tissues of the plant. Suitable well-known reporter genes include for example beta-glucuronidase or beta-galactosidase. The promoter activity is assayed by measuring the enzymatic activity of the beta-glucuronidase or beta-galactosidase. The promoter strength and/or expression pattern may then be compared to that of a reference promoter (such as the one used in the methods of the present invention). Alternatively, promoter strength may be assayed by quantifying mRNA levels or by comparing mRNA levels of the nucleic acid used in the methods of the present invention, with mRNA levels of housekeeping genes such as 18S rRNA, using methods known in the art, such as Northern blotting with densitometric analysis of autoradiograms, quantitative real-time PCR or RT-PCR (Heid et al., 1996 Genome Methods 6: 986-994). Generally by “weak promoter” is intended a promoter that drives expression of a coding sequence at a low level. By “low level” is intended at levels of about 1/10,000 transcripts to about 1/100,000 transcripts, to about 1/500,0000 transcripts per cell. Conversely, a “strong promoter” drives expression of a coding sequence at high level, or at about 1/10 transcripts to about 1/100 transcripts to about 1/1000 transcripts per cell. Generally, by “medium strength promoter” is intended a promoter that drives expression of a coding sequence at a lower level than a strong promoter, in particular at a level that is in all instances below that obtained when under the control of a 35S CaMV promoter.

### Operably Linked

[0067] The term “operably linked” as used herein refers to a functional linkage between the promoter sequence and the gene of interest, such that the promoter sequence is able to initiate transcription of the gene of interest.

### Constitutive Promoter

[0068] A “constitutive promoter” refers to a promoter that is transcriptionally active during most, but not necessarily all, phases of growth and development and under most environmental conditions, in at least one cell, tissue or organ. Table 2a below gives examples of constitutive promoters.

TABLE 2a
Examples of constitutive promoters

| Gene Source | Reference |
|---|---|
| Actin | McElroy et al, Plant Cell, 2: 163-171, 1990 |
| HMGP | WO 2004/070039 |
| CAMV 35S | Odell et al, Nature, 313: 810-812, 1985 |
| CaMV 19S | Nilsson et al., Physiol. Plant. 100:456-462, 1997 |
| GOS2 | de Pater et al, Plant J Nov;2(6):837-44, 1992, WO 2004/065596 |
| Ubiquitin | Christensen et al, Plant Mol. Biol. 18: 675-689, 1992 |
| Rice cyclophilin | Buchholz et al, Plant Mol Biol. 25(5): 837-43, 1994 |
| Maize H3 histone | Lepetit et al, Mol. Gen. Genet. 231:276-285, 1992 |
| Alfalfa H3 histone | Wu et al. Plant Mol. Biol. 11:641-649, 1988 |
| Actin 2 | An et al, Plant J. 10(1); 107-121, 1996 |
| 34S FMV | Sanger et al., Plant. Mol. Biol., 14, 1990: 433-443 |
| Rubisco small subunit | U.S. Pat. No. 4,962,028 |
| OCS | Leisner (1988) Proc Natl Acad Sci USA 85(5): 2553 |
| SAD1 | Jain et al., Crop Science, 39 (6), 1999: 1696 |
| SAD2 | Jain et al., Crop Science, 39 (6), 1999: 1696 |
| nos | Shaw et al. (1984) Nucleic Acids Res. 12(20):7831-7846 |
| V-ATPase | WO 01/14572 |
| Super promoter | WO 95/14098 |
| G-box proteins | WO 94/12015 |

### Ubiquitous Promoter

[0069] A ubiquitous promoter is active in substantially all tissues or cells of an organism.

### Developmentally-Regulated Promoter

[0070] A developmentally-regulated promoter is active during certain developmental stages or in parts of the plant that undergo developmental changes.

### Inducible Promoter

[0071] An inducible promoter has induced or increased transcription initiation in response to a chemical (for a review see Gatz 1997, Annu. Rev. Plant Physiol. Plant Mol. Biol., 48:89-108), environmental or physical stimulus, or may be “stress-inducible”, i.e. activated when a plant is exposed to various stress conditions, or a “pathogen-inducible” i.e. activated when a plant is exposed to exposure to various pathogens.

### Organ-Specific/Tissue-Specific Promoter

[0072] An organ-specific or tissue-specific promoter is one that is capable of preferentially initiating transcription in certain organs or tissues, such as the leaves, roots, seed tissue etc. For example, a “root-specific promoter” is a promoter that is transcriptionally active predominantly in plant roots, substantially to the exclusion of any other parts of a plant, whilst still allowing for any leaky expression in these other plant parts. Promoters able to initiate transcription in certain cells only are referred to herein as “cell-specific”.

[0073] Examples of root-specific promoters are listed in Table 2b below:

TABLE 2b
Examples of root-specific promoters

| Gene Source | Reference |
|---|---|
| RCc3 | Plant Mol Biol. 1995 January 27 (2): 237-48 |
| Arabidopsis PHT1 | Kovama et al., 2005; Mudge et al. (2002, Plant |
| | J. 31: 341) |
| Medicago phosphate | Xiao et al., 2006 |
| transporter | |
| Arabidopsis Pyk10 | Nitz et al. (2001) Plant Sci 161(2): 337-346 |
| root-expressible genes | Tingey et al., EMBO J. 6: 1, 1987. |
| tobacco auxin-inducible gene | Van der Zaal et al., Plant Mol. Biol. 16, 983, 1991. |
| β-tubulin | Oppenheimer, et al., Gene 63: 87, 1988. |
| tobacco root-specific genes | Conkling, et al., Plant Physiol. 93: 1203, 1990. |
| B. napus G1-3b gene | U.S. Pat. No. 5,401,836 |
| SbPRP1 | Suzuki et al., Plant Mol. Biol. 21: 109-119, 1993. |
| LRX1 | Baumberger et al. 2001, Genes & Dev. 15: 1128 |
| BTG-26 Brassica napus | US 20050044585 |
| LeAMT1 (tomato) | Lauter et al. (1996, PNAS 3: 8139) |
| The LeNRT1-1 (tomato) | Lauter et al. (1996, PNAS 3: 8139) |
| class I patatin gene (potato) | Liu et al., Plant Mol. Biol. 153: 386-395, 1991. |
| KDC1 (Daucus carota) | Downey et al. (2000, J. Biol. Chem. 275: 39420) |
| TobRB7 gene | W. Song (1997) PhD Thesis, North Carolina State |
| | University, Raleigh, NC USA |
| OsRAB5a (rice) | Wang et al. 2002, Plant Sci. 163: 273 |
| ALF5 (Arabidopsis) | Diener et al. (2001, Plant Cell 13: 1625) |
| NRT2; 1Np (N. plumbaginifolia) | Quesada et al. (1997, Plant Mol. Biol. 34: 265) |

[0074] A seed-specific promoter is transcriptionally active predominantly in seed tissue, but not necessarily exclusively in seed tissue (in cases of leaky expression). The seed-specific promoter may be active during seed development and/or during germination. The seed specific promoter may be endosperm/aleurone/embryo specific. Examples of seed-specific promoters (endosperm/aleurone/embryo specific) are shown in Table 2c to Table 2f below. Further examples of seed-specific promoters are given in Qing Qu and Takaiwa (Plant Biotechnol. J. 2, 113-125, 2004), which disclosure is incorporated by reference herein as if fully set forth.

TABLE 2c
Examples of seed-specific promoters

| Gene source | Reference |
|---|---|
| seed-specific genes | Simon et al., Plant Mol. Biol. 5: 191, 1985; |
| | Scofield et al., J. Biol. Chem. 262: 12202, 1987.; |
| | Baszczynski et al., Plant Mol. Biol. 14: 633, 1990. |
| Brazil Nut albumin | Pearson et al., Plant Mol. Biol. 18: 235-245, 1992. |
| legumin | Ellis et al., Plant Mol. Biol. 10: 203-214, 1988. |
| glutelin (rice) | Takaiwa et al., Mol. Gen. Genet. 208: 15-22, 1986; |
| | Takaiwa et al., FEBS Letts. 221: 43-47, 1987. |
| zein | Matzke et al Plant Mol Biol, 14(3): 323-32 1990 |
| napA | Stalberg et al, Planta 199: 515-519, 1996. |
| wheat LMW and HMW | Mol Gen Genet 216: 81-90, 1989; NAR 17: 461-2, 1989 |
| glutenin-1 | |
| wheat SPA | Albani et al, Plant Cell, 9: 171-184, 1997 |
| wheat α, β, y-gliadins | EMBO J. 3: 1409-15, 1984 |
| barley ltr1 promoter | Diaz et al. (1995) Mol Gen Genet 248(5): 592-8 |
| barley B1, C, D, hordein | Theor Appl Gen 98: 1253-62, 1999; Plant J 4: 343-55, |
| | 1993; Mol Gen Genet 250: 750-60, 1996 |
| barley DOF | Mena et al, The Plant Journal, 116(1): 53-62, 1998 |
| blz2 | EP99106056.7 |
| synthetic promoter | Vicente-Carbajosa et al., Plant J. 13: 629-640, 1998. |
| rice prolamin NRP33 | Wu et al, Plant Cell Physiology 39(8) 885-889, 1998 |
| rice a-globulin Glb-1 | Wu et al, Plant Cell Physiology 39(8) 885-889, 1998 |
| rice OSH1 | Sato et al, Proc. Natl. Acad. Sci. USA, 93: 8117-8122, |
| | 1996 |
| rice α-globulin REB/OHP-1 | Nakase et al. Plant Mol. Biol. 33: 513-522, 1997 |
| rice ADP-glucose pyrophos- | Trans Res 6: 157-68, 1997 |
| phorylase | |
| maize ESR gene family | Plant J 12: 235-46, 1997 |
| sorghum α-kafirin | DeRose et al., Plant Mol. Biol 32: 1029-35, 1996 |
| KNOX | Postma-Haarsma et al, Plant Mol. Biol. 39: 257-71, 1999 |
| rice oleosin | Wu et al, J. Biochem. 123: 386, 1998 |
| sunflower oleosin | Cummins et al., Plant Mol. Biol. 19: 873-876, 1992 |
| PRO0117, putative rice 40S | WO 2004/070039 |
| ribosomal protein | |
| PRO0136, rice alanine | unpublished |
| aminotransferase | |
| PRO0147, trypsin inhibitor | unpublished |
| ITR1 (barley) | |
| PRO0151, rice WSI18 | WO 2004/070039 |
| PRO0175, rice RAB21 | WO 2004/070039 |
| PRO005 | WO 2004/070039 |
| PRO0095 | WO 2004/070039 |
| α-amylase (Amy32b) | Lanahan et al, Plant Cell 4: 203-211, 1992; Skriver et al, |
| | Proc Natl Acad Sci USA 88: 7266-7270, 1991 |
| cathepsin β-like gene | Cejudo et al, Plant Mol Biol 20: 849-856, 1992 |
| Barley Ltp2 | Kalla et al., Plant J. 6: 849-60, 1994 |
| Chi26 | Leah et al., Plant J. 4: 579-89, 1994 |
| Maize B-Peru | Selinger et al., Genetics 149; 1125-38, 1998 |

TABLE 2d
examples of endosperm-specific promoters

| Gene source | Reference |
|---|---|
| glutelin (rice) | Takaiwa et al. (1986) Mol Gen Genet 208: 15-22; |
| | Takaiwa et al. (1987) FEBS Letts. 221: 43-47 |
| zein | Matzke et al., (1990) Plant Mol Biol 14(3): 323-32 |
| wheat LMW and HMW glutenin-1 | Colot et al. (1989) Mol Gen Genet 216: 81-90, |
| | Anderson et al. (1989) NAR 17: 461-2 |
| wheat SPA | Albani et al. (1997) Plant Cell 9: 171-184 |
| wheat gliadins | Rafalski et al. (1984) EMBO 3: 1409-15 |
| barley ltr1 promoter | Diaz et al. (1995) Mol Gen Genet 248(5): 592-8 |
| barley B1, C, D, hordein | Cho et al. (1999) Theor Appl Genet 98: 1253-62; |
| | Muller et al. (1993) Plant J 4: 343-55; |
| | Sorenson et al. (1996) Mol Gen Genet 250: 750-60 |
| barley DOF | Mena et al, (1998) Plant J 116(1): 53-62 |
| blz2 | Onate et al. (1999) J Biol Chem 274(14): 9175-82 |
| synthetic promoter | Vicente-Carbajosa et al. (1998) Plant J 13: 629-640 |
| rice prolamin NRP33 | Wu et al, (1998) Plant Cell Physiol 39(8) 885-889 |
| rice globulin Glb-1 | Wu et al. (1998) Plant Cell Physiol 39(8) 885-889 |
| rice globulin REB/OHP-1 | Nakase et al. (1997) Plant Molec Biol 33: 513-522 |
| rice ADP-glucose pyrophosphorylase | Russell et al. (1997) Trans Res 6: 157-68 |
| maize ESR gene family | Opsahl-Ferstad et al. (1997) Plant J 12: 235-46 |
| sorghum kafirin | DeRose et al. (1996) Plant Mol Biol 32: 1029-35 |

TABLE 2e
Examples of embryo specific promoters:

| Gene source | Reference |
|---|---|
| rice OSH1 | Sato et al, Proc. Natl. Acad. Sci. USA, 93: 8117-8122, 1996 |
| KNOX | Postma-Haarsma et al, Plant Mol. Biol. 39: 257-71, 1999 |
| PRO0151 | WO 2004/070039 |
| PRO0175 | WO 2004/070039 |
| PRO005 | WO 2004/070039 |
| PRO0095 | WO 2004/070039 |

TABLE 2f
Examples of aleurone-specific promoters:

| Gene source | Reference |
|---|---|
| α-amylase (Amy32b) | Lanahan et al, Plant Cell 4: 203-211, 1992; |
| | Skriver et al, Proc Natl Acad Sci USA 88: |
| | 7266-7270, 1991 |
| cathepsin β-like gene | Cejudo et al, Plant Mol Biol 20: 849-856, 1992 |
| Barley Ltp2 | Kalla et al., Plant J. 6: 849-60, 1994 |
| Chi26 | Leah et al., Plant J. 4: 579-89, 1994 |
| Maize B-Peru | Selinger et al., Genetics 149; 1125-38, 1998 |

[0075] A green tissue-specific promoter as defined herein is a promoter that is transcriptionally active predominantly in green tissue, substantially to the exclusion of any other parts of a plant, whilst still allowing for any leaky expression in these other plant parts.

[0076] Examples of green tissue-specific promoters which may be used to perform the methods of the invention are shown in Table 2g below.

TABLE 2g
Examples of green tissue-specific promoters

| Gene | Expression | Reference |
|---|---|---|
| Maize Orthophosphate dikinase | Leaf specific | Fukavama et al., 2001 |
| Maize Phosphoenolpyruvate | Leaf specific | Kausch et al., 2001 |
| carboxylase | | |
| Rice Phosphoenolpyruvate | Leaf specific | Liu et al., 2003 |
| carboxylase | | |
| Rice small subunit Rubisco | Leaf specific | Nomura et al., 2000 |
| rice beta expansin EXBP9 | Shoot specific | WO 2004/070039 |
| Pigeonpea small subunit Rubisco | Leaf specific | Panguluri et al., 2005 |
| Pea RBCS3A | Leaf specific | |

[0077] Another example of a tissue-specific promoter is a meristem-specific promoter, which is transcriptionally active predominantly in meristematic tissue, substantially to the exclusion of any other parts of a plant, whilst still allowing for any leaky expression in these other plant parts. Examples of green meristem-specific promoters which may be used to perform the methods of the invention are shown in Table 2h below.

TABLE 2h
Examples of meristem-specific promoters

| Gene source | Expression pattern | Reference |
|---|---|---|
| rice OSH1 | Shoot apical meristem, | Sato et al. (1996) Proc. |
| | from embryo globular | Natl. Acad. Sci. USA, 93: |
| | stage to seedling stage | 8117-8122 |
| Rice metallothionein | Meristem specific | BAD87835.1 |
| WAK1 & WAK 2 | Shoot and root apical | Wagner & Kohorn (2001) |
| | meristems, and in | Plant Cell 13(2): 303-318 |
| | expanding leaves and | |
| | sepals | |

### Terminator

[0078] The term “terminator” encompasses a control sequence which is a DNA sequence at the end of a transcriptional unit which signals 3′ processing and polyadenylation of a primary transcript and termination of transcription. The terminator can be derived from the natural gene, from a variety of other plant genes, or from T-DNA. The terminator to be added may be derived from, for example, the nopaline synthase or octopine synthase genes, or alternatively from another plant gene, or less preferably from any other eukaryotic gene.

### Selectable Marker (Gene)/Reporter Gene

[0079] “Selectable marker”, “selectable marker gene” or “reporter gene” includes any gene that confers a phenotype on a cell in which it is expressed to facilitate the identification and/or selection of cells that are transfected or transformed with a nucleic acid construct of the invention. These marker genes enable the identification of a successful transfer of the nucleic acid molecules via a series of different principles. Suitable markers may be selected from markers that confer antibiotic or herbicide resistance, that introduce a new metabolic trait or that allow visual selection. Examples of selectable marker genes include genes conferring resistance to antibiotics (such as nptII that phosphorylates neomycin and kanamycin, or hpt, phosphorylating hygromycin, or genes conferring resistance to, for example, bleomycin, streptomycin, tetracyclin, chloramphenicol, ampicillin, gentamycin, geneticin (G418), spectinomycin or blasticidin), to herbicides (for example bar which provides resistance to Basta®; aroA or gox providing resistance against glyphosate, or the genes conferring resistance to, for example, imidazolinone, phosphinothricin or sulfonylurea), or genes that provide a metabolic trait (such as manA that allows plants to use mannose as sole carbon source or xylose isomerase for the utilisation of xylose, or antinutritive markers such as the resistance to 2-deoxyglucose). Expression of visual marker genes results in the formation of colour (for example β-glucuronidase, GUS or 3-galactosidase with its coloured substrates, for example X-Gal), luminescence (such as the luciferin/luceferase system) or fluorescence (Green Fluorescent Protein, GFP, and derivatives thereof). This list represents only a small number of possible markers. The skilled worker is familiar with such markers. Different markers are preferred, depending on the organism and the selection method.

[0080] It is known that upon stable or transient integration of nucleic acids into plant cells, only a minority of the cells takes up the foreign DNA and, if desired, integrates it into its genome, depending on the expression vector used and the transfection technique used. To identify and select these integrants, a gene coding for a selectable marker (such as the ones described above) is usually introduced into the host cells together with the gene of interest. These markers can for example be used in mutants in which these genes are not functional by, for example, deletion by conventional methods. Furthermore, nucleic acid molecules encoding a selectable marker can be introduced into a host cell on the same vector that comprises the sequence encoding the polypeptides of the invention or used in the methods of the invention, or else in a separate vector. Cells which have been stably transfected with the introduced nucleic acid can be identified for example by selection (for example, cells which have integrated the selectable marker survive whereas the other cells die).

[0081] Since the marker genes, particularly genes for resistance to antibiotics and herbicides, are no longer required or are undesired in the transgenic host cell once the nucleic acids have been introduced successfully, the process according to the invention for introducing the nucleic acids advantageously employs techniques which enable the removal or excision of these marker genes. One such a method is what is known as co-transformation. The co-transformation method employs two vectors simultaneously for the transformation, one vector bearing the nucleic acid according to the invention and a second bearing the marker gene(s). A large proportion of transformants receives or, in the case of plants, comprises (up to 40% or more of the transformants), both vectors. In case of transformation with Agrobacteria, the transformants usually receive only a part of the vector, i.e. the sequence flanked by the T-DNA, which usually represents the expression cassette. The marker genes can subsequently be removed from the transformed plant by performing crosses. In another method, marker genes integrated into a transposon are used for the transformation together with desired nucleic acid (known as the Ac/Ds technology). The transformants can be crossed with a transposase source or the transformants are transformed with a nucleic acid construct conferring expression of a transposase, transiently or stable. In some cases (approx. 10%), the transposon jumps out of the genome of the host cell once transformation has taken place successfully and is lost. In a further number of cases, the transposon jumps to a different location. In these cases the marker gene must be eliminated by performing crosses. In microbiology, techniques were developed which make possible, or facilitate, the detection of such events. A further advantageous method relies on what is known as recombination systems; whose advantage is that elimination by crossing can be dispensed with. The best-known system of this type is what is known as the Cre/lox system. Cre1 is a recombinase that removes the sequences located between the loxP sequences. If the marker gene is integrated between the loxP sequences, it is removed once transformation has taken place successfully, by expression of the recombinase.

[0082] Further recombination systems are the HIN/HIX, FLP/FRT and REP/STB system (Tribble et al., J. Biol. Chem., 275, 2000: 22255-22267; Velmurugan et al., J. Cell Biol., 149, 2000: 553-566). A site-specific integration into the plant genome of the nucleic acid sequences according to the invention is possible. Naturally, these methods can also be applied to microorganisms such as yeast, fungi or bacteria.

### Transgenic/Transgene/Recombinant

[0083] For the purposes of the invention, “transgenic”, “transgene” or “recombinant” means with regard to, for example, a nucleic acid sequence, an expression cassette, gene construct or a vector comprising the nucleic acid sequence or an organism transformed with the nucleic acid sequences, expression cassettes or vectors according to the invention, all those constructions brought about by recombinant methods in which either
[0084] (a) the nucleic acid sequences encoding proteins useful in the methods of the invention, or
[0085] (b) genetic control sequence(s) which is operably linked with the nucleic acid sequence according to the invention, for example a promoter, or
[0086] (c) a) and b)
   are not located in their natural genetic environment or have been modified by recombinant methods, it being possible for the modification to take the form of, for example, a substitution, addition, deletion, inversion or insertion of one or more nucleotide residues. The natural genetic environment is understood as meaning the natural genomic or chromosomal locus in the original plant or the presence in a genomic library. In the case of a genomic library, the natural genetic environment of the nucleic acid sequence is preferably retained, at least in part. The environment flanks the nucleic acid sequence at least on one side and has a sequence length of at least 50 bp, preferably at least 500 bp, especially preferably at least 1000 bp, most preferably at least 5000 bp. A naturally occurring expression cassette—for example the naturally occurring combination of the natural promoter of the nucleic acid sequences with the corresponding nucleic acid sequence encoding a polypeptide useful in the methods of the present invention, as defined above—becomes a transgenic expression cassette when this expression cassette is modified by non-natural, synthetic (“artificial”) methods such as, for example, mutagenic treatment. Suitable methods are described, for example, in U.S. Pat. No. 5,565,350 or WO 00/15815.

[0087] A transgenic plant for the purposes of the invention is thus understood as meaning, as above, that the nucleic acids used in the method of the invention are not present in, or originating from, the genome of said plant; or are present in the genome of said plant but not at their natural locus in the genome of said plant, it being possible for the nucleic acids to be expressed homologously or heterologously. However, as mentioned, transgenic also means that, while the nucleic acids according to the invention or used in the inventive method are at their natural position in the genome of a plant, the sequence has been modified with regard to the natural sequence, and/or that the regulatory sequences of the natural sequences have been modified. Transgenic is preferably understood as meaning the expression of the nucleic acids according to the invention at an unnatural locus in the genome, i.e. homologous or, preferably, heterologous expression of the nucleic acids takes place. Preferred transgenic plants are mentioned herein.

[0088] It shall further be noted that in the context of the present invention, the term “isolated nucleic acid” or “isolated polypeptide” may in some instances be considered as a synonym for a “recombinant nucleic acid” or a “recombinant polypeptide”, respectively and refers to a nucleic acid or polypeptide that is not located in its natural genetic environment and/or that has been modified by recombinant methods.

### Modulation

[0089] The term “modulation” means in relation to expression or gene expression, a process in which the expression level is changed by said gene expression in comparison to the control plant, the expression level may be increased or decreased. The original, unmodulated expression may be of any kind of expression of a structural RNA (rRNA, tRNA) or mRNA with subsequent translation. For the purposes of this invention, the original unmodulated expression may also be absence of any expression. The term “modulating the activity” shall mean any change of the expression of the inventive nucleic acid sequences or encoded proteins, which leads to increased yield and/or increased growth of the plants. The expression can increase from zero (absence of or immeasurable expression) to a certain amount, or can decrease from a certain amount to immeasurable small amounts or zero.

### Expression

[0090] The term “expression” or “gene expression” means the transcription of a specific gene or specific genes or specific genetic construct. The term “expression” or “gene expression” in particular means the transcription of a gene or genes or genetic construct into structural RNA (rRNA, tRNA) or mRNA with or without subsequent translation of the latter into a protein. The process includes transcription of DNA and processing of the resulting mRNA product.

### Increased Expression/Overexpression

[0091] The term “increased expression” or “overexpression” as used herein means any form of expression that is additional to the original wild-type expression level. For the purposes of this invention, the original wild-type expression level might also be zero (absence of or immeasurable expression).

[0092] Methods for increasing expression of genes or gene products are well documented in the art and include, for example, overexpression driven by appropriate promoters, the use of transcription enhancers or translation enhancers. Isolated nucleic acids which serve as promoter or enhancer elements may be introduced in an appropriate position (typically upstream) of a non-heterologous form of a polynucleotide so as to upregulate expression of a nucleic acid encoding the polypeptide of interest. For example, endogenous promoters may be altered in vivo by mutation, deletion, and/or substitution (see, Kmiec, U.S. Pat. No. 5,565,350; Zarling et al., WO9322443), or isolated promoters may be introduced into a plant cell in the proper orientation and distance from a gene of the present invention so as to control the expression of the gene.

[0093] If polypeptide expression is desired, it is generally desirable to include a polyadenylation region at the 3′-end of a polynucleotide coding region. The polyadenylation region can be derived from the natural gene, from a variety of other plant genes, or from T-DNA. The 3′ end sequence to be added may be derived from, for example, the nopaline synthase or octopine synthase genes, or alternatively from another plant gene, or less preferably from any other eukaryotic gene.

[0094] An intron sequence may also be added to the 5′ untranslated region (UTR) or the coding sequence of the partial coding sequence to increase the amount of the mature message that accumulates in the cytosol. Inclusion of a spliceable intron in the transcription unit in both plant and animal expression constructs has been shown to increase gene expression at both the mRNA and protein levels up to 1000-fold (Buchman and Berg (1988) Mol. Cell biol. 8: 4395-4405; Callis et al. (1987) Genes Dev 1:1183-1200). Such intron enhancement of gene expression is typically greatest when placed near the 5′ end of the transcription unit. Use of the maize introns Adh1-S intron 1, 2, and 6, the Bronze-1 intron are known in the art. For general information see: The Maize Handbook, Chapter 116, Freeling and Walbot, Eds., Springer, N.Y. (1994).

### Decreased Expression

[0095] Reference herein to “decreased expression” or “reduction or substantial elimination” of expression is taken to mean a decrease in endogenous gene expression and/or polypeptide levels and/or polypeptide activity relative to control plants. The reduction or substantial elimination is in increasing order of preference at least 10%, 20%, 30%, 40% or 50%, 60%, 70%, 80%, 85%, 90%, or 95%, 96%, 97%, 98%, 99% or more reduced compared to that of control plants.

[0096] For the reduction or substantial elimination of expression an endogenous gene in a plant, a sufficient length of substantially contiguous nucleotides of a nucleic acid sequence is required. In order to perform gene silencing, this may be as little as 20, 19, 18, 17, 16, 15, 14, 13, 12, 11, 10 or fewer nucleotides, alternatively this may be as much as the entire gene (including the 5′ and/or 3′ UTR, either in part or in whole). The stretch of substantially contiguous nucleotides may be derived from the nucleic acid encoding the protein of interest (target gene), or from any nucleic acid capable of encoding an orthologue, paralogue or homologue of the protein of interest. Preferably, the stretch of substantially contiguous nucleotides is capable of forming hydrogen bonds with the target gene (either sense or antisense strand), more preferably, the stretch of substantially contiguous nucleotides has, in increasing order of preference, 50%, 60%, 70%, 80%, 85%, 90%, 95%, 96%, 97%, 98%, 99%, 100% sequence identity to the target gene (either sense or antisense strand). A nucleic acid sequence encoding a (functional) polypeptide is not a requirement for the various methods discussed herein for the reduction or substantial elimination of expression of an endogenous gene.

[0097] This reduction or substantial elimination of expression may be achieved using routine tools and techniques. A preferred method for the reduction or substantial elimination of endogenous gene expression is by introducing and expressing in a plant a genetic construct into which the nucleic acid (in this case a stretch of substantially contiguous nucleotides derived from the gene of interest, or from any nucleic acid capable of encoding an orthologue, paralogue or homologue of any one of the protein of interest) is cloned as an inverted repeat (in part or completely), separated by a spacer (non-coding DNA).

[0098] In such a preferred method, expression of the endogenous gene is reduced or substantially eliminated through RNA-mediated silencing using an inverted repeat of a nucleic acid or a part thereof (in this case a stretch of substantially contiguous nucleotides derived from the gene of interest, or from any nucleic acid capable of encoding an orthologue, paralogue or homologue of the protein of interest), preferably capable of forming a hairpin structure. The inverted repeat is cloned in an expression vector comprising control sequences. A non-coding DNA nucleic acid sequence (a spacer, for example a matrix attachment region fragment (MAR), an intron, a polylinker, etc.) is located between the two inverted nucleic acids forming the inverted repeat. After transcription of the inverted repeat, a chimeric RNA with a self-complementary structure is formed (partial or complete). This double-stranded RNA structure is referred to as the hairpin RNA (hpRNA). The hpRNA is processed by the plant into siRNAs that are incorporated into an RNA-induced silencing complex (RISC). The RISC further cleaves the mRNA transcripts, thereby substantially reducing the number of mRNA transcripts to be translated into polypeptides. For further general details see for example, Grierson et al. (1998) WO 98/53083; Waterhouse et al. (1999) WO 99/53050).

[0099] Performance of the methods of the invention does not rely on introducing and expressing in a plant a genetic construct into which the nucleic acid is cloned as an inverted repeat, but any one or more of several well-known “gene silencing” methods may be used to achieve the same effects.

[0100] One such method for the reduction of endogenous gene expression is RNA-mediated silencing of gene expression (downregulation). Silencing in this case is triggered in a plant by a double stranded RNA sequence (dsRNA) that is substantially similar to the target endogenous gene. This dsRNA is further processed by the plant into about 20 to about 26 nucleotides called short interfering RNAs (siRNAs). The siRNAs are incorporated into an RNA-induced silencing complex (RISC) that cleaves the mRNA transcript of the endogenous target gene, thereby substantially reducing the number of mRNA transcripts to be translated into a polypeptide. Preferably, the double stranded RNA sequence corresponds to a target gene.

[0101] Another example of an RNA silencing method involves the introduction of nucleic acid sequences or parts thereof (in this case a stretch of substantially contiguous nucleotides derived from the gene of interest, or from any nucleic acid capable of encoding an orthologue, paralogue or homologue of the protein of interest) in a sense orientation into a plant. “Sense orientation” refers to a DNA sequence that is homologous to an mRNA transcript thereof. Introduced into a plant would therefore be at least one copy of the nucleic acid sequence. The additional nucleic acid sequence will reduce expression of the endogenous gene, giving rise to a phenomenon known as co-suppression. The reduction of gene expression will be more pronounced if several additional copies of a nucleic acid sequence are introduced into the plant, as there is a positive correlation between high transcript levels and the triggering of co-suppression.

[0102] Another example of an RNA silencing method involves the use of antisense nucleic acid sequences. An “antisense” nucleic acid sequence comprises a nucleotide sequence that is complementary to a “sense” nucleic acid sequence encoding a protein, i.e. complementary to the coding strand of a double-stranded cDNA molecule or complementary to an mRNA transcript sequence. The antisense nucleic acid sequence is preferably complementary to the endogenous gene to be silenced. The complementarity may be located in the “coding region” and/or in the “non-coding region” of a gene. The term “coding region” refers to a region of the nucleotide sequence comprising codons that are translated into amino acid residues. The term “non-coding region” refers to 5′ and 3′ sequences that flank the coding region that are transcribed but not translated into amino acids (also referred to as 5′ and 3′ untranslated regions).

[0103] Antisense nucleic acid sequences can be designed according to the rules of Watson and Crick base pairing. The antisense nucleic acid sequence may be complementary to the entire nucleic acid sequence (in this case a stretch of substantially contiguous nucleotides derived from the gene of interest, or from any nucleic acid capable of encoding an orthologue, paralogue or homologue of the protein of interest), but may also be an oligonucleotide that is antisense to only a part of the nucleic acid sequence (including the mRNA 5′ and 3′ UTR). For example, the antisense oligonucleotide sequence may be complementary to the region surrounding the translation start site of an mRNA transcript encoding a polypeptide. The length of a suitable antisense oligonucleotide sequence is known in the art and may start from about 50, 45, 40, 35, 30, 25, 20, 15 or 10 nucleotides in length or less. An antisense nucleic acid sequence according to the invention may be constructed using chemical synthesis and enzymatic ligation reactions using methods known in the art. For example, an antisense nucleic acid sequence (e.g., an antisense oligonucleotide sequence) may be chemically synthesized using naturally occurring nucleotides or variously modified nucleotides designed to increase the biological stability of the molecules or to increase the physical stability of the duplex formed between the antisense and sense nucleic acid sequences, e.g., phosphorothioate derivatives and acridine substituted nucleotides may be used. Examples of modified nucleotides that may be used to generate the antisense nucleic acid sequences are well known in the art. Known nucleotide modifications include methylation, cyclization and ‘caps’ and substitution of one or more of the naturally occurring nucleotides with an analogue such as inosine. Other modifications of nucleotides are well known in the art.

[0104] The antisense nucleic acid sequence can be produced biologically using an expression vector into which a nucleic acid sequence has been subcloned in an antisense orientation (i.e., RNA transcribed from the inserted nucleic acid will be of an antisense orientation to a target nucleic acid of interest). Preferably, production of antisense nucleic acid sequences in plants occurs by means of a stably integrated nucleic acid construct comprising a promoter, an operably linked antisense oligonucleotide, and a terminator.

[0105] The nucleic acid molecules used for silencing in the methods of the invention (whether introduced into a plant or generated in situ) hybridize with or bind to mRNA transcripts and/or genomic DNA encoding a polypeptide to thereby inhibit expression of the protein, e.g., by inhibiting transcription and/or translation. The hybridization can be by conventional nucleotide complementarity to form a stable duplex, or, for example, in the case of an antisense nucleic acid sequence which binds to DNA duplexes, through specific interactions in the major groove of the double helix. Antisense nucleic acid sequences may be introduced into a plant by transformation or direct injection at a specific tissue site. Alternatively, antisense nucleic acid sequences can be modified to target selected cells and then administered systemically. For example, for systemic administration, antisense nucleic acid sequences can be modified such that they specifically bind to receptors or antigens expressed on a selected cell surface, e.g., by linking the antisense nucleic acid sequence to peptides or antibodies which bind to cell surface receptors or antigens. The antisense nucleic acid sequences can also be delivered to cells using the vectors described herein.

[0106] According to a further aspect, the antisense nucleic acid sequence is an a-anomeric nucleic acid sequence. An a-anomeric nucleic acid sequence forms specific double-stranded hybrids with complementary RNA in which, contrary to the usual b-units, the strands run parallel to each other (Gaultier et al. (1987) Nucl Ac Res 15: 6625-6641). The antisense nucleic acid sequence may also comprise a 2′-o-methylribonucleotide (Inoue et al. (1987) Nucl Ac Res 15, 6131-6148) or a chimeric RNA-DNA analogue (Inoue et al. (1987) FEBS Lett. 215, 327-330).

[0107] The reduction or substantial elimination of endogenous gene expression may also be performed using ribozymes. Ribozymes are catalytic RNA molecules with ribonuclease activity that are capable of cleaving a single-stranded nucleic acid sequence, such as an mRNA, to which they have a complementary region. Thus, ribozymes (e.g., hammerhead ribozymes (described in Haselhoff and Gerlach (1988) Nature 334, 585-591) can be used to catalytically cleave mRNA transcripts encoding a polypeptide, thereby substantially reducing the number of mRNA transcripts to be translated into a polypeptide. A ribozyme having specificity for a nucleic acid sequence can be designed (see for example: Cech et al. U.S. Pat. No. 4,987,071; and Cech et al. U.S. Pat. No. 5,116,742). Alternatively, mRNA transcripts corresponding to a nucleic acid sequence can be used to select a catalytic RNA having a specific ribonuclease activity from a pool of RNA molecules (Bartel and Szostak (1993) Science 261, 1411-1418). The use of ribozymes for gene silencing in plants is known in the art (e.g., Atkins et al. (1994) WO 94/00012; Lenne et al. (1995) WO 95/03404; Lutziger et al. (2000) WO 00/00619; Prinsen et al. (1997) WO 97/13865 and Scott et al. (1997) WO 97/38116).

[0108] Gene silencing may also be achieved by insertion mutagenesis (for example, T-DNA insertion or transposon insertion) or by strategies as described by, among others, Angell and Baulcombe ((1999) Plant J 20(3): 357-62), (Amplicon VIGS WO 98/36083), or Baulcombe (WO 99/15682).

[0109] Gene silencing may also occur if there is a mutation on an endogenous gene and/or a mutation on an isolated gene/nucleic acid subsequently introduced into a plant. The reduction or substantial elimination may be caused by a non-functional polypeptide. For example, the polypeptide may bind to various interacting proteins; one or more mutation(s) and/or truncation(s) may therefore provide for a polypeptide that is still able to bind interacting proteins (such as receptor proteins) but that cannot exhibit its normal function (such as signalling ligand).

[0110] A further approach to gene silencing is by targeting nucleic acid sequences complementary to the regulatory region of the gene (e.g., the promoter and/or enhancers) to form triple helical structures that prevent transcription of the gene in target cells. See Helene, C., Anticancer Drug Res. 6, 569-84, 1991; Helene et al., Ann. N.Y. Acad. Sci. 660, 27-36 1992; and Maher, L. J. Bioassays 14, 807-15, 1992.

[0111] Other methods, such as the use of antibodies directed to an endogenous polypeptide for inhibiting its function in planta, or interference in the signalling pathway in which a polypeptide is involved, will be well known to the skilled man. In particular, it can be envisaged that manmade molecules may be useful for inhibiting the biological function of a target polypeptide, or for interfering with the signalling pathway in which the target polypeptide is involved.

[0112] Alternatively, a screening program may be set up to identify in a plant population natural variants of a gene, which variants encode polypeptides with reduced activity. Such natural variants may also be used for example, to perform homologous recombination.

[0113] Artificial and/or natural microRNAs (miRNAs) may be used to knock out gene expression and/or mRNA translation. Endogenous miRNAs are single stranded small RNAs of typically 19-24 nucleotides long. They function primarily to regulate gene expression and/or mRNA translation. Most plant microRNAs (miRNAs) have perfect or near-perfect complementarity with their target sequences. However, there are natural targets with up to five mismatches. They are processed from longer non-coding RNAs with characteristic fold-back structures by double-strand specific RNases of the Dicer family. Upon processing, they are incorporated in the RNA-induced silencing complex (RISC) by binding to its main component, an Argonaute protein. MiRNAs serve as the specificity components of RISC, since they base-pair to target nucleic acids, mostly mRNAs, in the cytoplasm. Subsequent regulatory events include target mRNA cleavage and destruction and/or translational inhibition. Effects of miRNA overexpression are thus often reflected in decreased mRNA levels of target genes.

[0114] Artificial microRNAs (amiRNAs), which are typically 21 nucleotides in length, can be genetically engineered specifically to negatively regulate gene expression of single or multiple genes of interest. Determinants of plant microRNA target selection are well known in the art. Empirical parameters for target recognition have been defined and can be used to aid in the design of specific amiRNAs, (Schwab et al., Dev. Cell 8, 517-527, 2005). Convenient tools for design and generation of amiRNAs and their precursors are also available to the public (Schwab et al., Plant Cell 18, 1121-1133, 2006).

[0115] For optimal performance, the gene silencing techniques used for reducing expression in a plant of an endogenous gene requires the use of nucleic acid sequences from monocotyledonous plants for transformation of monocotyledonous plants, and from dicotyledonous plants for transformation of dicotyledonous plants. Preferably, a nucleic acid sequence from any given plant species is introduced into that same species. For example, a nucleic acid sequence from rice is transformed into a rice plant. However, it is not an absolute requirement that the nucleic acid sequence to be introduced originates from the same plant species as the plant in which it will be introduced. It is sufficient that there is substantial homology between the endogenous target gene and the nucleic acid to be introduced.

[0116] Described above are examples of various methods for the reduction or substantial elimination of expression in a plant of an endogenous gene. A person skilled in the art would readily be able to adapt the aforementioned methods for silencing so as to achieve reduction of expression of an endogenous gene in a whole plant or in parts thereof through the use of an appropriate promoter, for example.

### Transformation

[0117] The term “introduction” or “transformation” as referred to herein encompasses the transfer of an exogenous polynucleotide into a host cell, irrespective of the method used for transfer. Plant tissue capable of subsequent clonal propagation, whether by organogenesis or embryogenesis, may be transformed with a genetic construct of the present invention and a whole plant regenerated there from. The particular tissue chosen will vary depending on the clonal propagation systems available for, and best suited to, the particular species being transformed. Exemplary tissue targets include leaf disks, pollen, embryos, cotyledons, hypocotyls, megagametophytes, callus tissue, existing meristematic tissue (e.g., apical meristem, axillary buds, and root meristems), and induced meristem tissue (e.g., cotyledon meristem and hypocotyl meristem). The polynucleotide may be transiently or stably introduced into a host cell and may be maintained non-integrated, for example, as a plasmid. Alternatively, it may be integrated into the host genome. The resulting transformed plant cell may then be used to regenerate a transformed plant in a manner known to persons skilled in the art.

[0118] The transfer of foreign genes into the genome of a plant is called transformation. Transformation of plant species is now a fairly routine technique. Advantageously, any of several transformation methods may be used to introduce the gene of interest into a suitable ancestor cell. The methods described for the transformation and regeneration of plants from plant tissues or plant cells may be utilized for transient or for stable transformation. Transformation methods include the use of liposomes, electroporation, chemicals that increase free DNA uptake, injection of the DNA directly into the plant, particle gun bombardment, transformation using viruses or pollen and microprojection. Methods may be selected from the calcium/polyethylene glycol method for protoplasts (Krens, F. A. et al., (1982) Nature 296, 72-74; Negrutiu I et al. (1987) Plant Mol Biol 8: 363-373); electroporation of protoplasts (Shillito R. D. et al. (1985) Bio/Technol 3, 1099-1102); microinjection into plant material (Crossway A et al., (1986) Mol. Gen Genet 202: 179-185); DNA or RNA-coated particle bombardment (Klein T M et al., (1987) Nature 327: 70) infection with (non-integrative) viruses and the like. Transgenic plants, including transgenic crop plants, are preferably produced via Agrobacterium-mediated transformation. An advantageous transformation method is the transformation in planta. To this end, it is possible, for example, to allow the agrobacteria to act on plant seeds or to inoculate the plant meristem with agrobacteria. It has proved particularly expedient in accordance with the invention to allow a suspension of transformed agrobacteria to act on the intact plant or at least on the flower primordia. The plant is subsequently grown on until the seeds of the treated plant are obtained (Clough and Bent, Plant J. (1998) 16, 735-743). Methods for Agrobacterium-mediated transformation of rice include well known methods for rice transformation, such as those described in any of the following: European patent application EP 1198985 A1, Aldemita and Hodges (Planta 199: 612-617, 1996); Chan et al. (Plant Mol Biol 22 (3): 491-506, 1993), Hiei et al. (Plant J 6 (2): 271-282, 1994), which disclosures are incorporated by reference herein as if fully set forth. In the case of corn transformation, the preferred method is as described in either Ishida et al. (Nat. Biotechnol 14(6): 745-50, 1996) or Frame et al. (Plant Physiol 129(1): 13-22, 2002), which disclosures are incorporated by reference herein as if fully set forth. Said methods are further described by way of example in B. Jenes et al., Techniques for Gene Transfer, in: Transgenic Plants, Vol. 1, Engineering and Utilization, eds. S. D. Kung and R. Wu, Academic Press (1993) 128-143 and in Potrykus Annu. Rev. Plant Physiol. Plant Molec. Biol. 42 (1991) 205-225). The nucleic acids or the construct to be expressed is preferably cloned into a vector, which is suitable for transforming Agrobacterium tumefaciens, for example pBin19 (Bevan et al., Nucl. Acids Res. 12 (1984) 8711). Agrobacteria transformed by such a vector can then be used in known manner for the transformation of plants, such as plants used as a model, like Arabidopsis (Arabidopsis thaliana is within the scope of the present invention not considered as a crop plant), or crop plants such as, by way of example, tobacco plants, for example by immersing bruised leaves or chopped leaves in an agrobacterial solution and then culturing them in suitable media. The transformation of plants by means of Agrobacterium tumefaciens is described, for example, by Höfgen and Willmitzer in Nucl. Acid Res. (1988) 16, 9877 or is known inter alia from F. F. White, Vectors for Gene Transfer in Higher Plants; in Transgenic Plants, Vol. 1, Engineering and Utilization, eds. S. D. Kung and R. Wu, Academic Press, 1993, pp. 15-38.

[0119] In addition to the transformation of somatic cells, which then have to be regenerated into intact plants, it is also possible to transform the cells of plant meristems and in particular those cells which develop into gametes. In this case, the transformed gametes follow the natural plant development, giving rise to transgenic plants. Thus, for example, seeds of Arabidopsis are treated with agrobacteria and seeds are obtained from the developing plants of which a certain proportion is transformed and thus transgenic [Feldman, K A and Marks M D (1987). Mol Gen Genet 208:274-289; Mol Gen Genet 208:1-9; Feldmann K (1992). In: C Koncz, N-H Chua and J Shell, eds, Methods in Arabidopsis Research. Word Scientific, Singapore, pp. 274-289]. Alternative methods are based on the repeated removal of the inflorescences and incubation of the excision site in the center of the rosette with transformed agrobacteria, whereby transformed seeds can likewise be obtained at a later point in time (Chang (1994). Plant J. 5: 551-558; Katavic (1994). Mol Gen Genet, 245: 363-370). However, an especially effective method is the vacuum infiltration method with its modifications such as the “floral dip” method. In the case of vacuum infiltration of Arabidopsis, intact plants under reduced pressure are treated with an agrobacterial suspension [Bechthold, N (1993). C R Acad Sci Paris Life Sci, 316: 1194-1199], while in the case of the “floral dip” method the developing floral tissue is incubated briefly with a surfactant-treated agrobacterial suspension [Clough, S J and Bent A F (1998) The Plant J. 16, 735-743]. A certain proportion of transgenic seeds are harvested in both cases, and these seeds can be distinguished from non-transgenic seeds by growing under the above-described selective conditions. In addition the stable transformation of plastids is of advantages because plastids are inherited maternally is most crops reducing or eliminating the risk of transgene flow through pollen. The transformation of the chloroplast genome is generally achieved by a process which has been schematically displayed in Klaus et al., 2004 [Nature Biotechnology 22 (2), 225-229]. Briefly the sequences to be transformed are cloned together with a selectable marker gene between flanking sequences homologous to the chloroplast genome. These homologous flanking sequences direct site specific integration into the plastome. Plastidal transformation has been described for many different plant species and an overview is given in Bock (2001) Transgenic plastids in basic research and plant biotechnology. J Mol Biol. 2001 Sep. 21; 312 (3):425-38 or Maliga, P (2003) Progress towards commercialization of plastid transformation technology. Trends Biotechnol. 21, 20-28. Further biotechnological progress has recently been reported in form of marker free plastid transformants, which can be produced by a transient co-integrated maker gene (Klaus et al., 2004, Nature Biotechnology 22(2), 225-229).

[0120] The genetically modified plant cells can be regenerated via all methods with which the skilled worker is familiar. Suitable methods can be found in the above-mentioned publications by S. D. Kung and R. Wu, Potrykus or Höfgen and Willmitzer.

[0121] Generally after transformation, plant cells or cell groupings are selected for the presence of one or more markers which are encoded by plant-expressible genes co-transferred with the gene of interest, following which the transformed material is regenerated into a whole plant. To select transformed plants, the plant material obtained in the transformation is, as a rule, subjected to selective conditions so that transformed plants can be distinguished from untransformed plants. For example, the seeds obtained in the above-described manner can be planted and, after an initial growing period, subjected to a suitable selection by spraying. A further possibility consists in growing the seeds, if appropriate after sterilization, on agar plates using a suitable selection agent so that only the transformed seeds can grow into plants. Alternatively, the transformed plants are screened for the presence of a selectable marker such as the ones described above.

[0122] Following DNA transfer and regeneration, putatively transformed plants may also be evaluated, for instance using Southern analysis, for the presence of the gene of interest, copy number and/or genomic organisation. Alternatively or additionally, expression levels of the newly introduced DNA may be monitored using Northern and/or Western analysis, both techniques being well known to persons having ordinary skill in the art.

[0123] The generated transformed plants may be propagated by a variety of means, such as by clonal propagation or classical breeding techniques. For example, a first generation (or T1) transformed plant may be selfed and homozygous second-generation (or T2) transformants selected, and the T2 plants may then further be propagated through classical breeding techniques. The generated transformed organisms may take a variety of forms. For example, they may be chimeras of transformed cells and non-transformed cells; clonal transformants (e.g., all cells transformed to contain the expression cassette); grafts of transformed and untransformed tissues (e.g., in plants, a transformed rootstock grafted to an untransformed scion).

### T-DNA Activation Tagging

[0124] T-DNA activation tagging (Hayashi et al. Science (1992) 1350-1353), involves insertion of T-DNA, usually containing a promoter (may also be a translation enhancer or an intron), in the genomic region of the gene of interest or 10 kb up- or downstream of the coding region of a gene in a configuration such that the promoter directs expression of the targeted gene. Typically, regulation of expression of the targeted gene by its natural promoter is disrupted and the gene falls under the control of the newly introduced promoter. The promoter is typically embedded in a T-DNA. This T-DNA is randomly inserted into the plant genome, for example, through Agrobacterium infection and leads to modified expression of genes near the inserted T-DNA. The resulting transgenic plants show dominant phenotypes due to modified expression of genes close to the introduced promoter.

### Tilling

[0125] The term “TILLING” is an abbreviation of “Targeted Induced Local Lesions In Genomes” and refers to a mutagenesis technology useful to generate and/or identify nucleic acids encoding proteins with modified expression and/or activity. TILLING also allows selection of plants carrying such mutant variants. These mutant variants may exhibit modified expression, either in strength or in location or in timing (if the mutations affect the promoter for example). These mutant variants may exhibit higher activity than that exhibited by the gene in its natural form. TILLING combines high-density mutagenesis with high-throughput screening methods. The steps typically followed in TILLING are: (a) EMS mutagenesis (Redei G P and Koncz C (1992) In Methods in Arabidopsis Research, Koncz C, Chua N H, Schell J, eds. Singapore, World Scientific Publishing Co, pp. 16-82; Feldmann et al., (1994) In Meyerowitz E M, Somerville C R, eds, Arabidopsis. Cold Spring Harbor Laboratory Press, Cold Spring Harbor, N.Y., pp 137-172; Lightner J and Caspar T (1998) In J Martinez-Zapater, J Salinas, eds, Methods on Molecular Biology, Vol. 82. Humana Press, Totowa, N.J., pp 91-104); (b) DNA preparation and pooling of individuals; (c) PCR amplification of a region of interest; (d) denaturation and annealing to allow formation of heteroduplexes; (e) DHPLC, where the presence of a heteroduplex in a pool is detected as an extra peak in the chromatogram; (f) identification of the mutant individual; and (g) sequencing of the mutant PCR product. Methods for TILLING are well known in the art (McCallum et al., (2000) Nat Biotechnol 18: 455-457; reviewed by Stemple (2004) Nat Rev Genet 5(2): 145-50).

### Homologous Recombination

[0126] Homologous recombination allows introduction in a genome of a selected nucleic acid at a defined selected position. Homologous recombination is a standard technology used routinely in biological sciences for lower organisms such as yeast or the moss Physcomitrella. Methods for performing homologous recombination in plants have been described not only for model plants (Offring a et al. (1990) EMBO J 9(10): 3077-84) but also for crop plants, for example rice (Terada et al. (2002) Nat Biotech 20(10): 1030-4; Iida and Terada (2004) Curr Opin Biotech 15(2): 132-8), and approaches exist that are generally applicable regardless of the target organism (Miller et al, Nature Biotechnol. 25, 778-785, 2007).

### Yield Related Traits

[0127] Yield related traits are traits or features which are related to plant yield. Yield related traits may comprise one or more of the following non-limitative list of features: early flowering time, yield, biomass, seed yield, early vigour, greenness index, increased growth rate, improved agronomic traits (such as increased tolerance to submergence (which leads to increased yield in rice), improved Water Use Efficiency (WUE), Nitrogen Use Efficiency (NUE), etc.).

### Yield

[0128] The term “yield” in general means a measurable produce of economic value, typically related to a specified crop, to an area, and to a period of time. Individual plant parts directly contribute to yield based on their number, size and/or weight, or the actual yield is the yield per square meter for a crop and year, which is determined by dividing total production (includes both harvested and appraised production) by planted square meters.

### The Terms

[0129] “yield” of a plant or “plant yield” are used interchangeably herein may relate to vegetative biomass (root and/or shoot biomass), to reproductive organs, and/or to propagules (such as seeds) of that plant.

[0130] Taking corn as an example, a yield increase may be manifested as one or more of the following: increase in the number of plants established per square meter, an increase in the number of ears per plant, an increase in the number of rows, number of kernels per row, kernel weight, thousand kernel weight, ear length/diameter, increase in the seed filling rate (which is the number of filled seeds divided by the total number of seeds and multiplied by 100), among others. Taking rice as an example, a yield increase may manifest itself as an increase in one or more of the following: number of plants per square meter, number of panicles per plant, panicle length, number of spikelets per panicle, number of flowers (florets) per panicle, increase in the seed filling rate (which is the number of filled seeds divided by the total number of seeds and multiplied by 100), increase in thousand kernel weight, among others. In rice, submergence tolerance may also result in increased yield.

[0131] Flowers in maize are unisexual; male inflorescences (tassels) originate from the apical stem and female inflorescences (ears) arise from axillary bud apices. The female inflorescence produces pairs of spikelets on the surface of a central axis (cob). Each of the female spikelets encloses two fertile florets, one of them will usually mature into a maize kernel once fertilized. Hence a yield increase in maize may be manifested as one or more of the following: increase in the number of plants established per square meter, an increase in the number of ears per plant, an increase in the number of rows, number of kernels per row, kernel weight, thousand kernel weight, ear length/diameter, increase in the seed filling rate, which is the number of filled florets (i.e. florets containing seed) divided by the total number of florets and multiplied by 100), among others.

[0132] Inflorescences in rice plants are named panicles. The panicle bears spikelets, which are the basic units of the panicles, and which consist of a pedicel and a floret. The floret is borne on the pedicel and includes a flower that is covered by two protective glumes: a larger glume (the lemma) and a shorter glume (the palea). Hence, taking rice as an example, a yield increase may manifest itself as an increase in one or more of the following: number of plants per square meter, number of panicles per plant, panicle length, number of spikelets per panicle, number of flowers (or florets) per panicle; an increase in the seed filling rate which is the number of filled florets (i.e. florets containing seeds) divided by the total number of florets and multiplied by 100; an increase in thousand kernel weight, among others.

### Early Flowering Time

[0133] Plants having an “early flowering time” as used herein are plants which start to flower earlier than control plants. Hence this term refers to plants that show an earlier start of flowering. Flowering time of plants can be assessed by counting the number of days (“time to flower”) between sowing and the emergence of a first inflorescence. The “flowering time” of a plant can for instance be determined using the method as described in WO 2007/093444.

### Early Vigour

[0134] “Early vigour” refers to active healthy well-balanced growth especially during early stages of plant growth, and may result from increased plant fitness due to, for example, the plants being better adapted to their environment (i.e. optimizing the use of energy resources and partitioning between shoot and root). Plants having early vigour also show increased seedling survival and a better establishment of the crop, which often results in highly uniform fields (with the crop growing in uniform manner, i.e. with the majority of plants reaching the various stages of development at substantially the same time), and often better and higher yield. Therefore, early vigour may be determined by measuring various factors, such as thousand kernel weight, percentage germination, percentage emergence, seedling growth, seedling height, root length, root and shoot biomass and many more.

### Increased Growth Rate

[0135] The increased growth rate may be specific to one or more parts of a plant (including seeds), or may be throughout substantially the whole plant. Plants having an increased growth rate may have a shorter life cycle. The life cycle of a plant may be taken to mean the time needed to grow from a dry mature seed up to the stage where the plant has produced dry mature seeds, similar to the starting material. This life cycle may be influenced by factors such as speed of germination, early vigour, growth rate, greenness index, flowering time and speed of seed maturation. The increase in growth rate may take place at one or more stages in the life cycle of a plant or during substantially the whole plant life cycle. Increased growth rate during the early stages in the life cycle of a plant may reflect enhanced vigour. The increase in growth rate may alter the harvest cycle of a plant allowing plants to be sown later and/or harvested sooner than would otherwise be possible (a similar effect may be obtained with earlier flowering time). If the growth rate is sufficiently increased, it may allow for the further sowing of seeds of the same plant species (for example sowing and harvesting of rice plants followed by sowing and harvesting of further rice plants all within one conventional growing period). Similarly, if the growth rate is sufficiently increased, it may allow for the further sowing of seeds of different plants species (for example the sowing and harvesting of corn plants followed by, for example, the sowing and optional harvesting of soybean, potato or any other suitable plant). Harvesting additional times from the same rootstock in the case of some crop plants may also be possible. Altering the harvest cycle of a plant may lead to an increase in annual biomass production per square meter (due to an increase in the number of times (say in a year) that any particular plant may be grown and harvested). An increase in growth rate may also allow for the cultivation of transgenic plants in a wider geographical area than their wild-type counterparts, since the territorial limitations for growing a crop are often determined by adverse environmental conditions either at the time of planting (early season) or at the time of harvesting (late season). Such adverse conditions may be avoided if the harvest cycle is shortened. The growth rate may be determined by deriving various parameters from growth curves, such parameters may be: T-Mid (the time taken for plants to reach 50% of their maximal size) and T-90 (time taken for plants to reach 90% of their maximal size), amongst others.

### Stress Resistance

[0136] An increase in yield and/or growth rate occurs whether the plant is under non-stress conditions or whether the plant is exposed to various stresses compared to control plants. Plants typically respond to exposure to stress by growing more slowly. In conditions of severe stress, the plant may even stop growing altogether. Mild stress on the other hand is defined herein as being any stress to which a plant is exposed which does not result in the plant ceasing to grow altogether without the capacity to resume growth. Mild stress in the sense of the invention leads to a reduction in the growth of the stressed plants of less than 40%, 35%, 30% or 25%, more preferably less than 20% or 15% in comparison to the control plant under non-stress conditions. Due to advances in agricultural practices (irrigation, fertilization, pesticide treatments) severe stresses are not often encountered in cultivated crop plants. As a consequence, the compromised growth induced by mild stress is often an undesirable feature for agriculture. Mild stresses are the everyday biotic and/or abiotic (environmental) stresses to which a plant is exposed. Abiotic stresses may be due to drought or excess water, anaerobic stress, salt stress, chemical toxicity, oxidative stress and hot, cold or freezing temperatures.

[0137] “Biotic stresses” are typically those stresses caused by pathogens, such as bacteria, viruses, fungi, nematodes and insects.

[0138] The abiotic stress may be an osmotic stress caused by a water stress (particularly due to drought), salt stress, oxidative stress, an ionic stress or freezing stress. Abiotic stress may also be an oxidative stress or a cold stress. “Freezing stress” is intended to refer to stress due to freezing temperatures, i.e. temperatures at which available water molecules freeze and turn into ice. “Cold stress”, also called “chilling stress”, is intended to refer to cold temperatures, e.g. temperatures below 10°, or preferably below 5° C., but at which water molecules do not freeze. Biotic stresses are typically those stresses caused by pathogens, such as bacteria, viruses, fungi, nematodes and insects.

[0139] As reported in Wang et al. (Planta (2003) 218: 1-14), abiotic stress leads to a series of morphological, physiological, biochemical and molecular changes that adversely affect plant growth and productivity. Drought, salinity, extreme temperatures and oxidative stress are known to be interconnected and may induce growth and cellular damage through similar mechanisms. Rabbani et al. (Plant Physiol (2003) 133: 1755-1767) describes a particularly high degree of “cross talk” between drought stress and high-salinity stress. For example, drought and/or salinisation are manifested primarily as osmotic stress, resulting in the disruption of homeostasis and ion distribution in the cell. Oxidative stress, which frequently accompanies high or low temperature, salinity or drought stress, may cause denaturing of functional and structural proteins. As a consequence, these diverse environmental stresses often activate similar cell signalling pathways and cellular responses, such as the production of stress proteins, up-regulation of anti-oxidants, accumulation of compatible solutes and growth arrest. The term “non-stress” conditions as used herein are those environmental conditions that allow optimal growth of plants. Persons skilled in the art are aware of normal soil conditions and climatic conditions for a given location. Plants with optimal growth conditions, (grown under non-stress conditions) typically yield in increasing order of preference at least 97%, 95%, 92%, 90%, 87%, 85%, 83%, 80%, 77% or 75% of the average production of such plant in a given environment. Average production may be calculated on harvest and/or season basis. Persons skilled in the art are aware of average yield productions of a crop.

[0140] In particular, the methods of the present invention may be performed under non-stress conditions. In an example, the methods of the present invention may be performed under non-stress conditions such as mild drought to give plants having increased yield relative to control plants.

[0141] In another embodiment, the methods of the present invention may be performed under stress conditions.

[0142] In an example, the methods of the present invention may be performed under stress conditions such as drought to give plants having increased yield relative to control plants.

[0143] In another example, the methods of the present invention may be performed under stress conditions such as nutrient deficiency to give plants having increased yield relative to control plants.

[0144] Nutrient deficiency may result from a lack of nutrients such as nitrogen, phosphates and other phosphorous-containing compounds, potassium, calcium, magnesium, manganese, iron and boron, amongst others.

[0145] In yet another example, the methods of the present invention may be performed under stress conditions such as salt stress to give plants having increased yield relative to control plants. The term salt stress is not restricted to common salt (NaCl), but may be any one or more of: NaCl, KCl, LiCl, MgCl₂, CaCl₂, amongst others.

[0146] In yet another example, the methods of the present invention may be performed under stress conditions such as cold stress or freezing stress to give plants having increased yield relative to control plants.

### Increase/Improve/Enhance

[0147] The terms “increase”, “improve” or “enhance” are interchangeable and shall mean in the sense of the application at least a 3%, 4%, 5%, 6%, 7%, 8%, 9% or 10%, preferably at least 15% or 20%, more preferably 25%, 30%, 35% or 40% more yield and/or growth in comparison to control plants as defined herein.

### Seed Yield

[0148] Increased seed yield may manifest itself as one or more of the following:
[0149] a) an increase in seed biomass (total seed weight) which may be on an individual seed basis and/or per plant and/or per square meter;
[0150] b) increased number of flowers per plant;
[0151] c) increased number of seeds and/or increased number of (filled) seeds;
[0152] d) increased seed filling rate (which is expressed as the ratio between the number of filled seeds divided by the total number of seeds);
[0153] e) increased harvest index, which is expressed as a ratio of the yield of harvestable parts, such as seeds, divided by the total biomass; and
[0154] f) increased thousand kernel weight (TKW), which is extrapolated from the number of filled seeds counted and their total weight. An increased TKW may result from an increased seed size and/or seed weight, and may also result from an increase in embryo and/or endosperm size.

[0155] The terms “filled florets” and “filled seeds” may be considered synonyms.

[0156] An increase in seed yield may also be manifested as an increase in seed size and/or seed volume. Furthermore, an increase in seed yield may also manifest itself as an increase in seed area and/or seed length and/or seed width and/or seed perimeter. Increased yield may also result in modified architecture, or may occur because of modified architecture.

### Greenness Index

[0157] The “greenness index” as used herein is calculated from digital images of plants. For each pixel belonging to the plant object on the image, the ratio of the green value versus the red value (in the RGB model for encoding color) is calculated. The greenness index is expressed as the percentage of pixels for which the green-to-red ratio exceeds a given threshold. Under normal growth conditions, under salt stress growth conditions, and under reduced nutrient availability growth conditions, the greenness index of plants is measured in the last imaging before flowering. In contrast, under drought stress growth conditions, the greenness index of plants is measured in the first imaging after drought.

### Biomass

[0158] The term “biomass” as used herein is intended to refer to the total weight of a plant. Within the definition of biomass, a distinction may be made between the biomass of one or more parts of a plant, which may include any one or more of:
[0159] aboveground (harvestable) parts such as but not limited to shoot biomass, seed biomass, leaf biomass, etc.;
[0160] (harvestable) parts below ground, such as but not limited to root biomass, tubers, bulbs, etc.;
[0161] vegetative biomass such as root biomass, shoot biomass, etc.;
[0162] reproductive organs;
[0163] propagules such as seed.

### Marker Assisted Breeding

[0164] Such breeding programmes sometimes require introduction of allelic variation by mutagenic treatment of the plants, using for example EMS mutagenesis; alternatively, the programme may start with a collection of allelic variants of so called “natural” origin caused unintentionally. Identification of allelic variants then takes place, for example, by PCR. This is followed by a step for selection of superior allelic variants of the sequence in question and which give increased yield. Selection is typically carried out by monitoring growth performance of plants containing different allelic variants of the sequence in question. Growth performance may be monitored in a greenhouse or in the field. Further optional steps include crossing plants in which the superior allelic variant was identified with another plant. This could be used, for example, to make a combination of interesting phenotypic features.

### Use as Probes in (Gene Mapping)

[0165] Use of nucleic acids encoding the protein of interest for genetically and physically mapping the genes requires only a nucleic acid sequence of at least 15 nucleotides in length. These nucleic acids may be used as restriction fragment length polymorphism (RFLP) markers.

[0166] Southern blots (Sambrook J, Fritsch E F and Maniatis T (1989) Molecular Cloning, A Laboratory Manual) of restriction-digested plant genomic DNA may be probed with the nucleic acids encoding the protein of interest. The resulting banding patterns may then be subjected to genetic analyses using computer programs such as MapMaker (Lander et al. (1987) Genomics 1: 174-181) in order to construct a genetic map. In addition, the nucleic acids may be used to probe Southern blots containing restriction endonuclease-treated genomic DNAs of a set of individuals representing parent and progeny of a defined genetic cross. Segregation of the DNA polymorphisms is noted and used to calculate the position of the nucleic acid encoding the protein of interest in the genetic map previously obtained using this population (Botstein et al. (1980) Am. J. Hum. Genet. 32:314-331).

[0167] The production and use of plant gene-derived probes for use in genetic mapping is described in Bernatzky and Tanksley (1986) Plant Mol. Biol. Reporter 4: 37-41. Numerous publications describe genetic mapping of specific cDNA clones using the methodology outlined above or variations thereof. For example, F2 intercross populations, backcross populations, randomly mated populations, near isogenic lines, and other sets of individuals may be used for mapping. Such methodologies are well known to those skilled in the art.

[0168] The nucleic acid probes may also be used for physical mapping (i.e., placement of sequences on physical maps; see Hoheisel et al. In: Non-mammalian Genomic Analysis: A Practical Guide, Academic press 1996, pp. 319-346, and references cited therein).

[0169] In another embodiment, the nucleic acid probes may be used in direct fluorescence in situ hybridisation (FISH) mapping (Trask (1991) Trends Genet. 7:149-154). Although current methods of FISH mapping favour use of large clones (several kb to several hundred kb; see Laan et al. (1995) Genome Res. 5:13-20), improvements in sensitivity may allow performance of FISH mapping using shorter probes.

[0170] A variety of nucleic acid amplification-based methods for genetic and physical mapping may be carried out using the nucleic acids. Examples include allele-specific amplification (Kazazian (1989) J. Lab. Clin. Med 11:95-96), polymorphism of PCR-amplified fragments (CAPS; Sheffield et al. (1993) Genomics 16:325-332), allele-specific ligation (Landegren et al. (1988) Science 241:1077-1080), nucleotide extension reactions (Sokolov (1990) Nucleic Acid Res. 18:3671), Radiation Hybrid Mapping (Walter et al. (1997) Nat. Genet. 7:22-28) and Happy Mapping (Dear and Cook (1989) Nucleic Acid Res. 17:6795-6807). For these methods, the sequence of a nucleic acid is used to design and produce primer pairs for use in the amplification reaction or in primer extension reactions. The design of such primers is well known to those skilled in the art. In methods employing PCR-based genetic mapping, it may be necessary to identify DNA sequence differences between the parents of the mapping cross in the region corresponding to the instant nucleic acid sequence. This, however, is generally not necessary for mapping methods.

### Plant

[0171] The term “plant” as used herein encompasses whole plants, ancestors and progeny of the plants and plant parts, including seeds, shoots, stems, leaves, roots (including tubers), flowers, and tissues and organs, wherein each of the aforementioned comprise the gene/nucleic acid of interest. The term “plant” also encompasses plant cells, suspension cultures, callus tissue, embryos, meristematic regions, gametophytes, sporophytes, pollen and microspores, again wherein each of the aforementioned comprises the gene/nucleic acid of interest.

[0172] Plants that are particularly useful in the methods of the invention include all plants which belong to the superfamily Viridiplantae, in particular monocotyledonous and dicotyledonous plants including fodder or forage legumes, ornamental plants, food crops, trees or shrubs selected from the list comprising Acer spp., Actinidia spp., Abelmoschus spp., Agave sisalana, Agropyron spp., Agrostis stolonifera, Allium spp., Amaranthus spp., Ammophila arenaria, Ananas comosus, Annona spp., Apium graveolens, Arachis spp, Artocarpus spp., Asparagus officinalis, Avena spp. (e.g. Avena sativa, Avena fatua, Avena byzantina, Avena fatua var. sativa, Avena hybrida), Averrhoa carambola, Bambusa sp., Benincasa hispida, Bertholletia excelsea, Beta vulgaris, Brassica spp. (e.g. Brassica napus, Brassica rapa ssp. [canola, oilseed rape, turnip rape]), Cadaba farinosa, Camellia sinensis, Canna indica, Cannabis sativa, Capsicum spp., Carex elata, Carica papaya, Carissa macrocarpa, Carya spp., Carthamus tinctorius, Castanea spp., Ceiba pentandra, Cichorium endivia, Cinnamomum spp., Citrullus lanatus, Citrus spp., Cocos spp., Coffea spp., Colocasia esculenta, Cola spp., Corchorus sp., Coriandrum sativum, Corylus spp., Crataegus spp., Crocus sativus, Cucurbita spp., Cucumis spp., Cynara spp., Daucus carota, Desmodium spp., Dimocarpus longan, Dioscorea spp., Diospyros spp., Echinochloa spp., Elaeis (e.g. Elaeis guineensis, Elaeis oleifera), Eleusine coracana, Eragrostis tef, Erianthus sp., Eriobotrya japonica, Eucalyptus sp., Eugenia uniflora, Fagopyrum spp., Fagus spp., Festuca arundinacea, Ficus carica, Fortunella spp., Fragaria spp., Ginkgo biloba, Glycine spp. (e.g. Glycine max, Soja hispida or Soja max), Gossypium hirsutum, Helianthus spp. (e.g. Helianthus annuus), Hemerocallis fulva, Hibiscus spp., Hordeum spp. (e.g. Hordeum vulgare), Ipomoea batatas, Juglans spp., Lactuca sativa, Lathyrus spp., Lens culinaris, Linum usitatissimum, Litchi chinensis, Lotus spp., Luffa acutangula, Lupinus spp., Luzula sylvatica, Lycopersicon spp. (e.g. Lycopersicon esculentum, Lycopersicon lycopersicum, Lycopersicon pyriforme), Macrotyloma spp., Malus spp., Malpighia emarginate, Mammea americana, Mangifera indica, Manihot spp., Manilkara zapota, Medicago sativa, Melilotus spp., Mentha spp., Miscanthus sinensis, Momordica spp., Morus nigra, Musa spp., Nicotiana spp., Olea spp., Opuntia spp., Ornithopus spp., Oryza spp. (e.g. Oryza sativa, Oryza latifolia), Panicum miliaceum, Panicum virgatum, Passiflora edulis, Pastinaca sativa, Pennisetum sp., Persea spp., Petroselinum crispum, Phalaris arundinacea, Phaseolus spp., Phleum pratense, Phoenix spp., Phragmites australis, Physalis spp., Pinus spp., Pistacia vera, Pisum spp., Poa spp., Populus spp., Prosopis spp., Prunus spp., Psidium spp., Punica granatum, Pyrus communis, Quercus spp., Raphanus sativus, Rheum rhabarbarum, Ribes spp., Ricinus communis, Rubus spp., Saccharum spp., Salix sp., Sambucus spp., Secale cereale, Sesamum spp., Sinapis sp., Solanum spp. (e.g. Solanum tuberosum, Solanum integrifolium or Solanum lycopersicum), Sorghum bicolor, Spinacia spp., Syzygium spp., Tagetes spp., Tamarindus indica, Theobroma cacao, Trifolium spp., Tripsacum dactyloides, Triticosecale rimpaui, Triticum spp. (e.g. Triticum aestivum, Triticum durum, Triticum turgidum, Triticum hybernum, Triticum macha, Triticum sativum, Triticum monococcum or Triticum vulgare), Tropaeolum minus, Tropaeolum majus, Vaccinium spp., Vicia spp., Vigna spp., Viola odorata, Vitis spp., Zea mays, Zizania palustris, Ziziphus spp., amongst others.

### Control Plant(s)

[0173] The choice of suitable control plants is a routine part of an experimental setup and may include corresponding wild type plants or corresponding plants without the gene of interest. The control plant is typically of the same plant species or even of the same variety as the plant to be assessed. The control plant may also be a nullizygote of the plant to be assessed. Nullizygotes are individuals missing the transgene by segregation. A “control plant” as used herein refers not only to whole plants, but also to plant parts, including seeds and seed parts.

### DETAILED DESCRIPTION OF THE INVENTION

[0174] Surprisingly, it has now been found that modulating expression in a plant of a nucleic acid encoding an OsRSZ33 RRM polypeptide or a growth-related polypeptide or a ZPR polypeptide as described hereunder gives plants having enhanced yield-related traits, in particular increased yield, and more particularly increased seed yield relative to control plants.

[0175] According to a first embodiment, the present invention provides a method for enhancing yield-related traits in plants relative to control plants, comprising modulating expression in a plant of a nucleic acid encoding an OsRSZ33 RRM polypeptide or a growth-related polypeptide as defined herein or a ZPR polypeptide and optionally selecting for plants having enhanced yield-related traits.

[0176] According to another embodiment, the present invention provides a method for producing plants having enhanced yield-related traits relative to control plants, wherein said method comprises the steps of modulating expression in said plant of a nucleic acid encoding an OsRSZ33 RRM polypeptide, or a growth-related polypeptide or a ZPR polypeptide as described herein and optionally selecting for plants having enhanced yield-related traits.

[0177] A preferred method for modulating, preferably increasing, expression of a nucleic acid encoding an OsRSZ33 RRM polypeptide or a growth-related polypeptide as described herein or a ZPR polypeptide is by introducing and expressing in a plant a nucleic acid encoding an OsRSZ33 RRM polypeptide or a growth-related polypeptide as provided herein or a ZPR polypeptide, respectively.

[0178] Concerning “OsRSZ33 RRM polypeptides” any reference hereinafter to a “protein useful in the methods of the invention” is taken to mean an OsRSZ33 RRM polypeptide as defined herein. Any reference hereinafter to a “nucleic acid useful in the methods of the invention” is taken to mean a nucleic acid capable of encoding such an OsRSZ33 RRM polypeptide. The isolated nucleic acid to be introduced into a plant (and therefore useful in performing the methods of the invention) is any nucleic acid encoding the type of protein which will now be described, hereafter also named “OsRSZ33 RRM nucleic acid” or “OsRSZ33 RRM gene”. Preferably the isolated OsRSZ33 RRM nucleic acid to be introduced into a host cell or plant is substantially similar to the endogenous OsRSZ33 RRM gene of that host cell or host plant. In one preferred embodiment, the nucleic acid encoding the OsRSZ33 RRM polypeptide is a genomic sequence, in another preferred embodiment, the nucleic acid encoding the OsRSZ33 RRM polypeptide is a cDNA sequence.

[0179] Concerning “growth-related proteins”, also denoted as GRP, any reference hereinafter to a “protein useful in the methods of the invention” is taken to mean a growth-related polypeptide as defined herein. Any reference hereinafter to a “nucleic acid useful in the methods of the invention” is taken to mean a nucleic acid capable of encoding a growth-related polypeptide as defined herein. The nucleic acid to be introduced into a plant, and therefore useful in performing the methods of the invention, is any nucleic acid encoding the type of protein which will now be described, hereafter also named “growth-related nucleic acid” or “growth-related gene”.

[0180] Concerning ZPR polypeptides, any reference hereinafter to a “protein useful in the methods of the invention” is taken to mean a “ZPR polypeptide”, also named “ZPR protein” as defined herein. ZPR stands for “Little Zipper Protein. Any reference hereinafter to a “nucleic acid useful in the methods of the invention” is taken to mean a nucleic acid capable of encoding such a ZPR polypeptide. The nucleic acid to be introduced into a plant (and therefore useful in performing the methods of the invention) is any nucleic acid encoding the type of protein which will now be described, hereafter also named “ZPR nucleic acid” or “ZPR gene”.

[0181] An “OsRSZ33 RRM polypeptide” as defined herein refers to any polypeptide comprising from N- to C-terminus an RRM domain, two Zinc Knuckles and an RS domain (FIG. 1). Preferably, the RRM domain corresponds to the RRM_{—}1 domain of Pfam entry PF00076 (SMART SM00360, ProfileScan PS50102) and the Zn knuckles to the zf-CCHC domain of Pfam entry PF00098 (SMART SM00343, ProfileScan PS50158, FPrintScan PR00939). Preferably, the C-terminal domain starting from the last conserved Cys residue of the second Znc finger domain (which C-terminal domain comprises the RS domain), has an Arg+Ser content of more than 13%, preferably at least 14, 15, 16, 17, 18, 19, 20%, more preferably at least 21, 22, 23, 24, 25, 26, 27, 28, 29%, most preferably it has 30%, 31%, 32, 33%, 34%, 35% or more of the amino acids are Arg and/or Ser.

[0182] Alternatively and/or additionally, the OsRSZ33 RRM polypeptide comprises one or more of the following motifs:

Motif 1 (SEQ ID NO: 241):
PPPG[ST]GRCFNCG[IL]DGHWARDCKAGDWKNKCYRCG
ERGHIERNC[QK]NSP[KR][KN]L
Motif 2 (SEQ ID NO: 242):
[AHL]F[SG][RK]YGR[VI]R[GDE]V[DE][ML]K[NRH]D[YF]AF
[VI][DE]FSDPRDA[DE][DE]ARY[NS]L[DN]GRD[VF]DGSRI
[ILV]VEFA
Motif3 (SEQ ID NO: 243):
YG[NGS]TRLYVG[RH]L[SA]SRTR[ST]RDLE

[0183] Motifs 1 to 3 were derived using the MEME algorithm (Bailey and Elkan, Proceedings of the Second International Conference on Intelligent Systems for Molecular Biology, pp. 28-36, AAAI Press, Menlo Park, Calif., 1994). At each position within a MEME motif, the residues are shown that are present in the query set of sequences with a frequency higher than 0.2. Residues within square brackets represent alternatives.

[0184] Alternatively and or additionally, OsRSZ33 RRM polypeptides comprise one or more of the following signature sequences:

Motif 4 (SEQ ID NO: 244):
RLYVGRL
Motif 5 (SEQ ID NO: 245):
RDYAFIE
Motif 6 (SEQ ID NO: 246):
RSYSRS

[0185] Motifs 4 and 5 are related to respectively the RNP 2 and RNP1 submotifs in the RRM domain (Lopato et al., 2002).

[0186] More preferably, the OsRSZ33 RRM polypeptide comprises in increasing order of preference, at least 2, at least 3, at least 4, at least 5, or all 6 motifs.

[0187] Additionally or alternatively, the homologue of an OsRSZ33 RRM protein has in increasing order of preference at least 25%, 26%, 27%, 28%, 29%, 30%, 31%, 32%, 33%, 34%, 35%, 36%, 37%, 38%, 39%, 40%, 41%, 42%, 43%, 44%, 45%, 46%, 47%, 48%, 49%, 50%, 51%, 52%, 53%, 54%, 55%, 56%, 57%, 58%, 59%, 60%, 61%, 62%, 63%, 64%, 65%, 66%, 67%, 68%, 69%, 70%, 71%, 72%, 73%, 74%, 75%, 76%, 77%, 78%, 79%, 80%, 81%, 82%, 83%, 84%, 85%, 86%, 87%, 88%, 89%, 90%, 91%, 92%, 93%, 94%, 95%, 96%, 97%, 98%, or 99% overall sequence identity to the amino acid represented by SEQ ID NO: 2, provided that the homologous protein comprises any one or more of the conserved motifs as outlined above. The overall sequence identity is determined using a global alignment algorithm, such as the Needleman Wunsch algorithm in the program GAP (GCG Wisconsin Package, Accelrys), preferably with default parameters and preferably with sequences of mature proteins (i.e. without taking into account secretion signals or transit peptides). Compared to overall sequence identity, the sequence identity will generally be higher when only conserved domains or motifs are considered. Preferably the motifs in an OsRSZ33 RRM polypeptide have, in increasing order of preference, at least 70%, 71%, 72%, 73%, 74%, 75%, 76%, 77%, 78%, 79%, 80%, 81%, 82%, 83%, 84%, 85%, 86%, 87%, 88%, 89%, 90%, 91%, 92%, 93%, 94%, 95%, 96%, 97%, 98%, or 99% sequence identity to any one or more of the motifs represented by SEQ ID NO: 241 to SEQ ID NO: 246 (Motifs 1 to 6).

[0188] The terms “domain”, “signature” and “motif” are defined in the “definitions” section herein.

[0189] Preferably, the polypeptide sequence which when used in the construction of a phylogenetic tree, such as the one depicted in FIG. 3, clusters with the group of SR proteins with two Zinc Knuckles, polypeptides comprising the amino acid sequence represented by SEQ ID NO: 2 (OsRSZ36), rather than with any other group.

[0190] Furthermore, OsRSZ33 RRM polypeptides (at least in their native form) typically interact with other splicing factors (Lopato et al., 2002). Tools and techniques for measuring protein-protein interactions, such as yeast two-hybrid screens, are well known in the art. Further details are provided in Example 6.

[0191] In addition, OsRSZ33 RRM polypeptides, when expressed in rice according to the methods of the present invention as outlined in Examples 7 and 8, give plants having increased yield related traits, in particular one or more of increased biomass, seed yield and/or early vigour.

[0192] The present invention is illustrated by transforming plants with the nucleic acid sequence represented by SEQ ID NO: 1, encoding the polypeptide sequence of SEQ ID NO: 2. However, performance of the invention is not restricted to these sequences; the methods of the invention may advantageously be performed using any OsRSZ33 RRM-encoding nucleic acid or OsRSZ33 RRM polypeptide as defined herein.

[0193] Examples of nucleic acids encoding OsRSZ33 RRM polypeptides are given in Table A of the Examples section herein. Such nucleic acids are useful in performing the methods of the invention. The amino acid sequences given in Table A of the Examples section are example sequences of orthologues and paralogues of the OsRSZ33 RRM polypeptide represented by SEQ ID NO: 2, the terms “orthologues” and “paralogues” being as defined herein. Further orthologues and paralogues may readily be identified by performing a so-called reciprocal blast search as described in the definitions section; where the query sequence is SEQ ID NO: 1 or SEQ ID NO: 2, the second BLAST (back-BLAST) would be against rice sequences.

[0194] The invention also provides hitherto unknown OsRSZ33 RRM-encoding nucleic acids and OsRSZ33 RRM polypeptides useful for conferring enhanced yield-related traits in plants relative to control plants.

[0195] According to a further embodiment of the present invention, there is therefore provided an isolated nucleic acid molecule selected from:
[0196] (i) a nucleic acid represented by any one of SEQ ID NO: 109, 135, 221, 115, 165, 225, 197, 211, or 237 (B.napus_BN06MC04617_{—}42261920@4606#1; G.max_GM06MC33050_sl61g01@32287#1; H.vulgare_c62741371hv270303@6248#1; V.vinifera_GSVIVT00023097001 #1; V.vinifera_GSVIVT00029498001#1; Z.mays_c67261821 gm030403@11244#1; Z.mays_c68511709 gm030403@11445#1; Z.mays_ZM07MC13041_BFb0138E15@13012#1; Z.mays_ZM07MC35249_BFb0381121@35142#1);
[0197] (ii) the complement of any of the nucleic acid represented by any one of SEQ ID NO: 109, 135, 221, 115, 165, 225, 197, 211, or 237;
[0198] (iii) a nucleic acid encoding an OsRSZ33 RRM polypeptide having in increasing order of preference at least 50%, 51%, 52%, 53%, 54%, 55%, 56%, 57%, 58%, 59%, 60%, 61%, 62%, 63%, 64%, 65%, 66%, 67%, 68%, 69%, 70%, 71%, 72%, 73%, 74%, 75%, 76%, 77%, 78%, 79%, 80%, 81%, 82%, 83%, 84%, 85%, 86%, 87%, 88%, 89%, 90%, 91%, 92%, 93%, 94%, 95%, 96%, 97%, 98%, or 99% sequence identity to any of the amino acid sequences represented by SEQ ID NO: 110, 136, 222, 116, 166, 226, 198, 212, or 238 (B.napus_BN06MC04617_{—}42261920@4606#1; >G.max_GM06MC33050_sl61g01@32287#1; >H.vulgare_c62741371hv270303@6248#1; >V.vinifera_GSVIVT00023097001#1; >V.vinifera_GSVIVT00029498001 #1; >Z.mays_c67261821 gm030403@11244#1; >Z.mays_c68511709 gm030403@11445#1; >Z.mays_ZM07MC13041_BFb0138E15@13012#1; >Z.mays_ZM07MC35249_BFb0381121@35142#1), and additionally or alternatively comprising one or more motifs having in increasing order of preference at least 50%, 55%, 60%, 65%, 70%, 75%, 80%, 85%, 90%, 95%, 96%, 97%, 98%, 99% or more sequence identity to any one or more of the motifs given in SEQ ID NO: 241 to SEQ ID NO: 246, and further preferably conferring enhanced yield-related traits relative to control plants.
[0199] (iv) a nucleic acid molecule which hybridizes with a nucleic acid molecule of (i) to (iii) under high stringency hybridization conditions and preferably confers enhanced yield-related traits relative to control plants.

[0200] According to a further embodiment of the present invention, there is also provided an isolated polypeptide selected from:
[0201] (i) an amino acid sequence represented by any of SEQ ID NO: 110, 136, 222, 116, 166, 226, 198, 212, or 238 (B.napus_BN06MC04617_{—}42261920@4606#1; >G.max_GM06MC33050_sl61g01·32287#1; >H.vulgare_c62741371hv270303@6248#1; >V.vinifera_GSVIVT00023097001#1; >V.vinifera_GSVIVT00029498001#1; >Z.mays_c67261821 gm030403@11244#1; >Z.mays_c68511709 gm030403@11445#1; >Z.mays_ZM07MC13041_BFb0138E15@13012#1; >Z.mays_ZM07MC35249_BFb0381121@35142#1);
[0202] (ii) an amino acid sequence having, in increasing order of preference, at least 50%, 51%, 52%, 53%, 54%, 55%, 56%, 57%, 58%, 59%, 60%, 61%, 62%, 63%, 64%, 65%, 66%, 67%, 68%, 69%, 70%, 71%, 72%, 73%, 74%, 75%, 76%, 77%, 78%, 79%, 80%, 81%, 82%, 83%, 84%, 85%, 86%, 87%, 88%, 89%, 90%, 91%, 92%, 93%, 94%, 95%, 96%, 97%, 98%, or 99% sequence identity to the amino acid sequence represented by any one of SEQ ID NO: 110, 136, 222, 116, 166, 226, 198, 212, or 238 (B.napus_BN06MC04617_{—}42261920@4606#1; >G.max_GM06MC33050_sl161g01@32287#1; >H.vulgare_c62741371hv270303@6248#1; >V.vinifera_GSVIVT00023097001#1; >V.vinifera_GSVIVT00029498001 #1; >Z.mays_c67261821 gm030403@11244#1; >Z.mays_c68511709 gm030403@11445#1; >Z.mays_ZM07MC13041_BFb0138E15@13012#1; >Z.mays_ZM07MC35249_BFb0381121@35142#1), and additionally or alternatively comprising one or more motifs having in increasing order of preference at least 50%, 55%, 60%, 65%, 70%, 75%, 80%, 85%, 90%, 95%, 96%, 97%, 98%, 99% or more sequence identity to any one or more of the motifs given in SEQ ID NO: 241 to SEQ ID NO: 246, and further preferably conferring enhanced yield-related traits relative to control plants;
[0203] (iii) derivatives of any of the amino acid sequences given in (i) or (ii) above.

[0204] Nucleic acid variants may also be useful in practising the methods of the invention. Examples of such variants include nucleic acids encoding homologues and derivatives of any one of the amino acid sequences given in Table A of the Examples section, the terms “homologue” and “derivative” being as defined herein. Also useful in the methods of the invention are nucleic acids encoding homologues and derivatives of orthologues or paralogues of any one of the amino acid sequences given in Table A of the Examples section. Homologues and derivatives useful in the methods of the present invention have substantially the same biological and functional activity as the unmodified protein from which they are derived. Further variants useful in practising the methods of the invention are variants in which codon usage is optimised or in which miRNA target sites are removed.

[0205] Further nucleic acid variants useful in practising the methods of the invention include portions of nucleic acids encoding OsRSZ33 RRM polypeptides, nucleic acids hybridising to nucleic acids encoding OsRSZ33 RRM polypeptides, splice variants of nucleic acids encoding OsRSZ33 RRM polypeptides, allelic variants of nucleic acids encoding OsRSZ33 RRM polypeptides and variants of nucleic acids encoding OsRSZ33 RRM polypeptides obtained by gene shuffling. The terms hybridising sequence, splice variant, allelic variant and gene shuffling are as described herein.

[0206] Nucleic acids encoding OsRSZ33 RRM polypeptides need not be full-length nucleic acids, since performance of the methods of the invention does not rely on the use of full-length nucleic acid sequences. According to the present invention, there is provided a method for enhancing yield-related traits in plants, comprising introducing and expressing in a plant a portion of any one of the nucleic acid sequences given in Table A of the Examples section, or a portion of a nucleic acid encoding an orthologue, paralogue or homologue of any of the amino acid sequences given in Table A of the Examples section.

[0207] A portion of a nucleic acid may be prepared, for example, by making one or more deletions to the nucleic acid. The portions may be used in isolated form or they may be fused to other coding (or non-coding) sequences in order to, for example, produce a protein that combines several activities. When fused to other coding sequences, the resultant polypeptide produced upon translation may be bigger than that predicted for the protein portion.

[0208] Portions useful in the methods of the invention, encode an OsRSZ33 RRM polypeptide as defined herein, and have substantially the same biological activity as the amino acid sequences given in Table A of the Examples section. Preferably, the portion is a portion of any one of the nucleic acids given in Table A of the Examples section, or is a portion of a nucleic acid encoding an orthologue or paralogue of any one of the amino acid sequences given in Table A of the Examples section. Preferably the portion is at least 400, 450, 500, 550, 600, 650, 700, 750, 800, 850, 900, 950, 1000, 1050, 1100 consecutive nucleotides in length, the consecutive nucleotides being of any one of the nucleic acid sequences given in Table A of the Examples section, or of a nucleic acid encoding an orthologue or paralogue of any one of the amino acid sequences given in Table A of the Examples section. Most preferably the portion is a portion of the nucleic acid of SEQ ID NO: 1. Preferably, the portion encodes a fragment of an amino acid sequence which, when used in the construction of a phylogenetic tree, such as the one depicted in FIG. 3, clusters with the group of SR proteins with two Zinc Knuckles, polypeptides comprising the amino acid sequence represented by SEQ ID NO: 2 (OsRSZ36), rather than with any other group and/or comprises an RRM domain, two Zinc knuckle domains and preferably also one or more of motifs 1 to 6.

[0209] Another nucleic acid variant useful in the methods of the invention is a nucleic acid capable of hybridising, under reduced stringency conditions, preferably under stringent conditions, with a nucleic acid encoding an OsRSZ33 RRM polypeptide as defined herein, or with a portion as defined herein.

[0210] According to the present invention, there is provided a method for enhancing yield-related traits in plants, comprising introducing and expressing in a plant a nucleic acid capable of hybridizing to any one of the nucleic acids given in Table A of the Examples section, or comprising introducing and expressing in a plant a nucleic acid capable of hybridising to a nucleic acid encoding an orthologue, paralogue or homologue of any of the nucleic acid sequences given in Table A of the Examples section.

[0211] Hybridising sequences useful in the methods of the invention encode an OsRSZ33 RRM polypeptide as defined herein, having substantially the same biological activity as the amino acid sequences given in Table A of the Examples section. Preferably, the hybridising sequence is capable of hybridising to the complement of any one of the nucleic acids given in Table A of the Examples section, or to a portion of any of these sequences, a portion being as defined above, or the hybridising sequence is capable of hybridising to the complement of a nucleic acid encoding an orthologue or paralogue of any one of the amino acid sequences given in Table A of the Examples section. Most preferably, the hybridising sequence is capable of hybridising to the complement of a nucleic acid as represented by SEQ ID NO: 1 or to a portion thereof.

[0212] Preferably, the hybridising sequence encodes a polypeptide with an amino acid sequence which, when full-length and used in the construction of a phylogenetic tree, such as the one depicted in FIG. 3, clusters with the group of SR proteins with two Zinc Knuckles, polypeptides comprising the amino acid sequence represented by SEQ ID NO: 2 (OsRSZ36), rather than with any other group and/or comprises an RRM domain, two Zinc knuckle domains and preferably also one or more of motifs 1 to 6.

[0213] Another nucleic acid variant useful in the methods of the invention is a splice variant encoding an OsRSZ33 RRM polypeptide as defined hereinabove, a splice variant being as defined herein.

[0214] According to the present invention, there is provided a method for enhancing yield-related traits in plants, comprising introducing and expressing in a plant a splice variant of any one of the nucleic acid sequences given in Table A of the Examples section, or a splice variant of a nucleic acid encoding an orthologue, paralogue or homologue of any of the amino acid sequences given in Table A of the Examples section.

[0215] Preferred splice variants are splice variants of a nucleic acid represented by SEQ ID NO: 1, or a splice variant of a nucleic acid encoding an orthologue or paralogue of SEQ ID NO: 2. Preferably, the amino acid sequence encoded by the splice variant, when used in the construction of a phylogenetic tree, such as the one depicted in FIG. 3, clusters with the group of SR proteins with two Zinc Knuckles, polypeptides comprising the amino acid sequence represented by SEQ ID NO: 2 (OsRSZ36), rather than with any other group and/or comprises an RRM domain, two Zinc knuckle domains and preferably also one or more of motifs 1 to 6.

[0216] Another nucleic acid variant useful in performing the methods of the invention is an allelic variant of a nucleic acid encoding an OsRSZ33 RRM polypeptide as defined hereinabove, an allelic variant being as defined herein.

[0217] According to the present invention, there is provided a method for enhancing yield-related traits in plants, comprising introducing and expressing in a plant an allelic variant of any one of the nucleic acids given in Table A of the Examples section, or comprising introducing and expressing in a plant an allelic variant of a nucleic acid encoding an orthologue, paralogue or homologue of any of the amino acid sequences given in Table A of the Examples section.

[0218] The polypeptides encoded by allelic variants useful in the methods of the present invention have substantially the same biological activity as the OsRSZ33 RRM polypeptide of SEQ ID NO: 2 and any of the amino acids depicted in Table A of the Examples section. Allelic variants exist in nature, and encompassed within the methods of the present invention is the use of these natural alleles. Preferably, the allelic variant is an allelic variant of SEQ ID NO: 1 or an allelic variant of a nucleic acid encoding an orthologue or paralogue of SEQ ID NO: 2. Preferably, the amino acid sequence encoded by the allelic variant, when used in the construction of a phylogenetic tree, such as the one depicted in FIG. 3, clusters with the group of SR proteins with two Zinc Knuckles, polypeptides comprising the amino acid sequence represented by SEQ ID NO: 2 (OsRSZ36), rather than with any other group and/or comprises an RRM domain, two Zinc knuckle domains and preferably also one or more of motifs 1 to 6.

[0219] Gene shuffling or directed evolution may also be used to generate variants of nucleic acids encoding OsRSZ33 RRM polypeptides as defined above; the term “gene shuffling” being as defined herein.

[0220] According to the present invention, there is provided a method for enhancing yield-related traits in plants, comprising introducing and expressing in a plant a variant of any one of the nucleic acid sequences given in Table A of the Examples section, or comprising introducing and expressing in a plant a variant of a nucleic acid encoding an orthologue, paralogue or homologue of any of the amino acid sequences given in Table A of the Examples section, which variant nucleic acid is obtained by gene shuffling.

[0221] Preferably, the amino acid sequence encoded by the variant nucleic acid obtained by gene shuffling, when used in the construction of a phylogenetic tree such as the one depicted in FIG. 3, clusters with the group of SR proteins with two Zinc Knuckles, polypeptides comprising the amino acid sequence represented by SEQ ID NO: 2 (OsRSZ36), rather than with any other group and/or comprises an RRM domain, two Zinc knuckle domains and preferably also one or more of motifs 1 to 6.

[0222] Furthermore, nucleic acid variants may also be obtained by site-directed mutagenesis. Several methods are available to achieve site-directed mutagenesis, the most common being PCR based methods (Current Protocols in Molecular Biology. Wiley Eds.).

[0223] Nucleic acids encoding OsRSZ33 RRM polypeptides may be derived from any natural or artificial source. The nucleic acid may be modified from its native form in composition and/or genomic environment through deliberate human manipulation. Preferably the OsRSZ33 RRM polypeptide-encoding nucleic acid is from a plant, further preferably from a monocotyledonous plant, more preferably from the family Poaceae, most preferably the nucleic acid is from Oryza sativa.

[0224] Performance of the methods of the invention gives plants having enhanced yield-related traits. In particular performance of the methods of the invention gives plants having increased early vigour and/or increased yield, especially increased seed yield and/or increased biomass relative to control plants. The terms “early vigour”, “yield” and “seed yield” are described in more detail in the “definitions” section herein.

[0225] Reference herein to enhanced yield-related traits is taken to mean an increase early vigour and/or in biomass (weight) of one or more parts of a plant, which may include aboveground (harvestable) parts and/or (harvestable) parts below ground. In particular, such harvestable parts are vegetative biomass (roots and/or shoots) and seeds, and performance of the methods of the invention results in plants having increased yield (increased biomass and/or seed yield) and/or increased early vigour, relative to the yield of control plants.

[0226] The present invention provides a method for increasing yield-related traits, especially early vigour, biomass and/ore seed yield of plants, relative to control plants, which method comprises modulating expression in a plant of a nucleic acid encoding an OsRSZ33 RRM polypeptide as defined herein.

[0227] Since the transgenic plants according to the present invention have increased yield-related traits, it is likely that these plants exhibit an increased growth rate (during at least part of their life cycle), relative to the growth rate of control plants at a corresponding stage in their life cycle.

[0228] According to a preferred feature of the present invention, performance of the methods of the invention gives plants having an increased growth rate relative to control plants. Therefore, according to the present invention, there is provided a method for increasing the growth rate of plants, which method comprises modulating expression in a plant of a nucleic acid encoding an OsRSZ33 RRM polypeptide as defined herein.

[0229] Performance of the methods of the invention gives plants grown under non-stress conditions or under mild drought conditions increased yield relative to control plants grown under comparable conditions. Therefore, according to the present invention, there is provided a method for increasing yield in plants grown under non-stress conditions or under mild drought conditions, which method comprises modulating expression in a plant of a nucleic acid encoding an OsRSZ33 RRM polypeptide.

[0230] Performance of the methods of the invention gives plants grown under conditions of nutrient deficiency, particularly under conditions of nitrogen deficiency, increased yield relative to control plants grown under comparable conditions. Therefore, according to the present invention, there is provided a method for increasing yield in plants grown under conditions of nutrient deficiency, which method comprises modulating expression in a plant of a nucleic acid encoding an OsRSZ33 RRM polypeptide.

[0231] Performance of the methods of the invention gives plants grown under conditions of salt stress, increased yield relative to control plants grown under comparable conditions. Therefore, according to the present invention, there is provided a method for increasing yield in plants grown under conditions of salt stress, which method comprises modulating expression in a plant of a nucleic acid encoding an OsRSZ33 RRM polypeptide.

[0232] The invention also provides genetic constructs and vectors to facilitate introduction and/or expression in plants of nucleic acids encoding OsRSZ33 RRM polypeptides. The gene constructs may be inserted into vectors, which may be commercially available, suitable for transforming into plants and suitable for expression of the gene of interest in the transformed cells. The invention also provides use of a gene construct as defined herein in the methods of the invention.

[0233] More specifically, the present invention provides a construct comprising:
[0234] (a) a nucleic acid encoding an OsRSZ33 RRM polypeptide as defined above;
[0235] (b) one or more control sequences capable of driving expression of the nucleic acid sequence of (a); and optionally
[0236] (c) a transcription termination sequence.

[0237] Preferably, the nucleic acid encoding an OsRSZ33 RRM polypeptide is as defined above. The term “control sequence” and “termination sequence” are as defined herein.

[0238] The invention furthermore provides plants transformed with a construct as described above. In particular, the invention provides plants transformed with a construct as described above, which plants have increased yield-related traits as described herein.

[0239] Plants are transformed with a vector comprising any of the nucleic acids described above. The skilled artisan is well aware of the genetic elements that must be present on the vector in order to successfully transform, select and propagate host cells containing the sequence of interest. The sequence of interest is operably linked to one or more control sequences (at least to a promoter).

[0240] Advantageously, any type of promoter, whether natural or synthetic, may be used to drive expression of the nucleic acid sequence, but preferably the promoter is of plant origin. A constitutive promoter is particularly useful in the methods. Preferably the constitutive promoter is a ubiquitous constitutive promoter of medium strength. See the “Definitions” section herein for definitions of the various promoter types.

[0241] It should be clear that the applicability of the present invention is not restricted to the OsRSZ33 RRM polypeptide-encoding nucleic acid represented by SEQ ID NO: 1, nor is the applicability of the invention restricted to expression of an OsRSZ33 RRM polypeptide-encoding nucleic acid when driven by a constitutive promoter.

[0242] The constitutive promoter is preferably a medium strength promoter. More preferably it is a plant derived promoter, such as a GOS2 promoter or a promoter of substantially the same strength and having substantially the same expression pattern (a functionally equivalent promoter), more preferably the promoter is the promoter GOS2 promoter from rice. Further preferably the constitutive promoter is represented by a nucleic acid sequence substantially similar to SEQ ID NO: 247, most preferably the constitutive promoter is as represented by SEQ ID NO: 247. See the “Definitions” section herein for further examples of constitutive promoters.

[0243] Optionally, one or more terminator sequences may be used in the construct introduced into a plant. Preferably, the construct comprises an expression cassette comprising a GOS2 promoter, substantially similar to SEQ ID NO: 247, and the nucleic acid encoding the OsRSZ33 RRM polypeptide. Furthermore, one or more sequences encoding selectable markers may be present on the construct introduced into a plant.

[0244] According to a preferred feature of the invention, the modulated expression is increased expression. Methods for increasing expression of nucleic acids or genes, or gene products, are well documented in the art and examples are provided in the definitions section.

[0245] As mentioned above, a preferred method for modulating expression of a nucleic acid encoding an OsRSZ33 RRM polypeptide is by introducing and expressing in a plant a nucleic acid encoding an OsRSZ33 RRM polypeptide; however the effects of performing the method, i.e. enhancing yield-related traits may also be achieved using other well known techniques, including but not limited to T-DNA activation tagging, TILLING, homologous recombination. A description of these techniques is provided in the definitions section.

[0246] The invention also provides a method for the production of transgenic plants having enhanced yield-related traits relative to control plants, comprising introduction and expression in a plant of any nucleic acid encoding an OsRSZ33 RRM polypeptide as defined hereinabove.

[0247] More specifically, the present invention provides a method for the production of transgenic plants having enhanced yield-related traits, particularly increased yield and/or increased early vigour, which method comprises:
[0248] (i) introducing and expressing in a plant or plant cell an OsRSZ33 RRM polypeptide-encoding nucleic acid or a genetic construct comprising an OsRSZ33 RRM polypeptide-encoding nucleic acid; and
[0249] (ii) cultivating the plant cell under conditions promoting plant growth and development.

[0250] The nucleic acid of (i) may be any of the nucleic acids capable of encoding an OsRSZ33 RRM polypeptide as defined herein.

[0251] The nucleic acid may be introduced directly into a plant cell or into the plant itself (including introduction into a tissue, organ or any other part of a plant). According to a preferred feature of the present invention, the nucleic acid is preferably introduced into a plant by transformation. The term “transformation” is described in more detail in the “definitions” section herein.

[0252] The present invention clearly extends to any plant cell or plant produced by any of the methods described herein, and to all plant parts and propagules thereof. The present invention encompasses plants or parts thereof (including seeds) obtainable by the methods according to the present invention. The plants or parts thereof comprise a nucleic acid transgene encoding an OsRSZ33 RRM polypeptide as defined above. The present invention extends further to encompass the progeny of a primary transformed or transfected cell, tissue, organ or whole plant that has been produced by any of the aforementioned methods, the only requirement being that progeny exhibit the same genotypic and/or phenotypic characteristic(s) as those produced by the parent in the methods according to the invention.

[0253] The invention also includes host cells containing an isolated nucleic acid encoding an OsRSZ33 RRM polypeptide as defined hereinabove. Preferred host cells according to the invention are plant cells. Host plants for the nucleic acids or the vector used in the method according to the invention, the expression cassette or construct or vector are, in principle, advantageously all plants, which are capable of synthesizing the polypeptides used in the inventive method.

[0254] The methods of the invention are advantageously applicable to any plant. Plants that are particularly useful in the methods of the invention include all plants which belong to the superfamily Viridiplantae, in particular monocotyledonous and dicotyledonous plants including fodder or forage legumes, ornamental plants, food crops, trees or shrubs. According to a preferred embodiment of the present invention, the plant is a crop plant. Examples of crop plants include soybean, chicory, carrot, cassava, trefoil, beet, sugar beet, sunflower, canola, alfalfa, rapeseed, linseed, cotton, tomato, potato and tobacco. Further preferably, the plant is a monocotyledonous plant. Examples of monocotyledonous plants include sugarcane. More preferably the plant is a cereal. Examples of cereals include rice, maize, wheat, barley, millet, rye, triticale, sorghum, emmer, spelt, secale, einkorn, teff, milo and oats.

[0255] The invention also extends to harvestable parts of a plant such as, but not limited to seeds, leaves, fruits, flowers, stems, roots, rhizomes, tubers and bulbs, which harvestable parts comprise a recombinant nucleic acid encoding an OsRSZ33 RRM polypeptide. The invention furthermore relates to products derived, preferably directly derived, from a harvestable part of such a plant, such as dry pellets or powders, oil, fat and fatty acids, starch or proteins.

[0256] The present invention also encompasses use of nucleic acids encoding OsRSZ33 RRM polypeptides as described herein and use of these OsRSZ33 RRM polypeptides in enhancing any of the aforementioned yield-related traits in plants. For example, nucleic acids encoding OsRSZ33 RRM polypeptide described herein, or the OsRSZ33 RRM polypeptides themselves, may find use in breeding programmes in which a DNA marker is identified which may be genetically linked to an OsRSZ33 RRM polypeptide-encoding gene. The nucleic acids/genes, or the OsRSZ33 RRM polypeptides themselves may be used to define a molecular marker. This DNA or protein marker may then be used in breeding programmes to select plants having enhanced yield-related traits as defined hereinabove in the methods of the invention. Furthermore, allelic variants of an OsRSZ33 RRM polypeptide-encoding nucleic acid/gene may find use in marker-assisted breeding programmes. Nucleic acids encoding OsRSZ33 RRM polypeptides may also be used as probes for genetically and physically mapping the genes that they are a part of, and as markers for traits linked to those genes. Such information may be useful in plant breeding in order to develop lines with desired phenotypes.

[0257] The terms “growth-related polypeptide”, “growth-related protein” or “GRP”, as given herein are all intended to include a polypeptide as represented by SEQ ID NO: 251 and homologues thereof. In an embodiment, a homologue of a GRP has in increasing order of preference at least 25%, 26%, 27%, 28%, 29%, 30%, 31%, 32%, 33%, 34%, 35%, 36%, 37%, 38%, 39%, 40%, 41%, 42%, 43%, 44%, 45%, 46%, 47%, 48%, 49%, 50%, 51%, 52%, 53%, 54%, 55%, 56%, 57%, 58%, 59%, 60%, 61%, 62%, 63%, 64%, 65%, 66%, 67%, 68%, 69%, 70%, 71%, 72%, 73%, 74%, 75%, 76%, 77%, 78%, 79%, 80%, 81%, 82%, 83%, 84%, 85%, 86%, 87%, 88%, 89%, 90%, 91%, 92%, 93%, 94%, 95%, 96%, 97%, 98%, or 99% overall sequence identity to the amino acid represented by SEQ ID NO: 251.

[0258] In an embodiment of the invention a method as provided herein is presented wherein said method comprises the modulation of expression in a plant of a nucleic acid encoding a growth-related protein (GRP) having at least 25% sequence identity to the amino acid sequence represented by SEQ ID NO: 251. In another embodiment, the present method comprises the modulation of expression in a plant of a nucleic acid encoding a growth-related protein (GRP) having at least 25%, and for instance at least 26%, 27%, 28%, 29%, 30%, 31%, 32%, 33%, 34%, 35%, 36%, 37%, 38%, 39%, 40%, 41%, 42%, 43%, 44%, 45%, 46%, 47%, 48%, 49%, 50%, 51%, 52%, 53%, 54%, 55%, 56%, 57%, 58%, 59%, 60%, 61%, 62%, 63%, 64%, 65%, 66%, 67%, 68%, 69%, 70%, 71%, 72%, 73%, 74%, 75%, 76%, 77%, 78%, 79%, 80%, 81%, 82%, 83%, 84%, 85%, 86%, 87%, 88%, 89%, 90%, 91%, 92%, 93%, 94%, 95%, 96%, 97%, 98%, or 99% overall sequence identity to the amino acid represented by SEQ ID NO: 251.

[0259] In another embodiment, a growth-related polypeptide according to the present invention comprises a conserved motif. The terms “domain”, “signature” and “motif” are defined in the “definitions” section herein.

[0260] In particular, in a preferred embodiment, a growth-related polypeptide according to the present invention comprises a motif which has at least 70% sequence identity to motif 7: [NHPS][SC][CR][RK]K[NK][VST][PD][GD][TAV][ST]F[VL][SE]DL[RK]DH[IM][HD]EFI[NH]AS[ASM]DEH[MRK][TH]CF[TK][KN]T[IL][KQ][KR]MF[GD]MS[KM][TA]V[AT] (SEQ ID NO: 742). Motif 7 was derived using the MEME algorithm (Bailey and Elkan, Proceedings of the Second International Conference on Intelligent Systems for Molecular Biology, pp. 28-36, AAAI Press, Menlo Park, Calif., 1994). At each position within a MEME motif, the residues are shown that are present in the query set of sequences with a frequency higher than 0.2. Residues within square brackets represent alternatives. In a preferred embodiment, a growth-related polypeptide according to the present invention comprises a motif which has in increasing order of preference at least 71%, 72%, 73%, 74%, 75%, 76%, 77%, 78%, 79%, 80%, 81%, 82%, 83%, 84%, 85%, 86%, 87%, 88%, 89%, 90%, 91%, 92%, 93%, 94%, 95%, 96%, 97%, 98%, or 99% sequence identity to the motif represented by SEQ ID NO: 742 (Motif 7).

[0261] Additionally or alternatively, the homologue of a GRP has in increasing order of preference at least 25%, 26%, 27%, 28%, 29%, 30%, 31%, 32%, 33%, 34%, 35%, 36%, 37%, 38%, 39%, 40%, 41%, 42%, 43%, 44%, 45%, 46%, 47%, 48%, 49%, 50%, 51%, 52%, 53%, 54%, 55%, 56%, 57%, 58%, 59%, 60%, 61%, 62%, 63%, 64%, 65%, 66%, 67%, 68%, 69%, 70%, 71%, 72%, 73%, 74%, 75%, 76%, 77%, 78%, 79%, 80%, 81%, 82%, 83%, 84%, 85%, 86%, 87%, 88%, 89%, 90%, 91%, 92%, 93%, 94%, 95%, 96%, 97%, 98%, or 99% overall sequence identity to the amino acid represented by SEQ ID NO: 251, provided that the homologous protein comprises a motif which has at least 70% sequence identity to conserved motif 7 as outlined above. The overall sequence identity is determined using a global alignment algorithm, such as the Needleman Wunsch algorithm in the program GAP (GCG Wisconsin Package, Accelrys), preferably with default parameters and preferably with sequences of mature proteins (i.e. without taking into account secretion signals or transit peptides). Compared to overall sequence identity, the sequence identity will generally be higher when only conserved domains or motifs are considered. Preferably the motif in a GRP has at least 70%, and for instance at least 71%, 72%, 73%, 74%, 75%, 76%, 77%, 78%, 79%, 80%, 81%, 82%, 83%, 84%, 85%, 86%, 87%, 88%, 89%, 90%, 91%, 92%, 93%, 94%, 95%, 96%, 97%, 98%, or 99% sequence identity to the motif represented by SEQ ID NO: 742 (Motif 7).

[0262] In an example, a growth-related polypeptide according to the present invention has a motif which has at least 70%, and for instance at least 71%, 72%, 73%, 74%, 75%, 76%, 77%, 78%, 79%, 80%, 81%, 82%, 83%, 84%, 85%, 86%, 87%, 88%, 89%, 90%, 91%, 92%, 93%, 94%, 95%, 96%, 97%, 98%, 99% sequence identity to motif X, or corresponds to motif X, wherein motif X is represented by: SCRKKKSDDATFLEDLKDHIDEFIHASMDEHKHCFK NTIQKMFGMSKVVA (SEQ ID NO: 743).

[0263] In other words, in another embodiment a method is provided wherein said GRP comprises a motif which has at least 70%, 71%, 72%, 73%, 74%, 75%, 76%, 77%, 78%, 79%, 80%, 81%, 82%, 83%, 84%, 85%, 86%, 87%, 88%, 89%, 90%, 91%, 92%, 93%, 94%, 95%, 96%, 97%, 98%, or 99% sequence identity to, or corresponds to a conserved domain of amino acid coordinates 23 to 72 of SEQ ID NO:251.

[0264] In addition, growth-related polypeptides according to the invention, when expressed transgenic plants such as e.g. rice according to the methods of the present invention as outlined in the example section, give plants having increased yield-related traits, and preferably increased yield relative to control plants, and even more preferably wherein said increased yield-related traits is selected from the group comprising or consisting of increased seed yield, increased biomass and early vigour.

[0265] The present invention is illustrated by transforming plants with the nucleic acid sequence represented by SEQ ID NO: 250, encoding the polypeptide sequence of SEQ ID NO: 251. However, performance of the invention is not restricted to these sequences; the methods of the invention may advantageously be performed using any GRP-encoding nucleic acid or GRP polypeptide as defined herein.

[0266] Examples of nucleic acids encoding GRP polypeptides are given in Table F of the Examples section. Any of the sequences listed in Table F is suitable for performing the methods according to the invention. The amino acid sequences given in Table F of the Examples section are exemplary sequences of orthologues and paralogues of the polypeptide represented by SEQ ID NO: 251, the terms “orthologues” and “paralogues” being as defined herein. Further orthologues and paralogues may readily be identified by performing a so-called reciprocal blast search as described in the definitions section; where the query sequence is SEQ ID NO: 250 or SEQ ID NO: 251, the second BLAST (back-BLAST) would be against rice sequences.

[0267] The invention also provides hitherto unknown GRP-encoding nucleic acids and growth-related proteins useful for conferring enhanced yield-related traits in plants relative to control plants.

[0268] According to an embodiment of the present invention, there is therefore provided an isolated nucleic acid selected from:
[0269] (i) a nucleic acid represented by any one of SEQ ID NO: 266, 286, 316, 374, 376, 380, 424, 456, 458, 460, 462, 648, 650, 670, and 736;
[0270] (ii) the complement of a nucleic acid represented by any one of SEQ ID NO: 266, 286, 316, 374, 376, 380, 424, 456, 458, 460, 462, 648, 650, 670, and 736;
[0271] (iii) a nucleic acid encoding the polypeptide as represented by any one of SEQ ID NO: 267, 287, 317, 375, 377, 381, 425, 457, 459, 461, 463, 649, 651, 671 and 737, preferably as a result of the degeneracy of the genetic code, said isolated nucleic acid can be derived from a polypeptide sequence as represented by any one of SEQ ID NO: 267, 287, 317, 375, 377, 381, 425, 457, 459, 461, 463, 649, 651, 671 and 737 and further preferably confers enhanced yield-related traits relative to control plants;
[0272] (iv) a nucleic acid having, in increasing order of preference at least 25%, 26%, 27%, 28%, 29%, 30%, 31%, 32%, 33%, 34%, 35%, 36%, 37%, 38%, 39%, 40%, 41%, 42%, 43%, 44%, 45%, 46%, 47%, 48%, 49%, 50%, 51%, 52%, 53%, 54%, 55%, 56%, 57%, 58%, 59%, 60%, 61%, 62%, 63%, 64%, 65%, 66%, 67%, 68%, 69%, 70%, 71%, 72%, 73%, 74%, 75%, 76%, 77%, 78%, 79%, 80%, 81%, 82%, 83%, 84%, 85%, 86%, 87%, 88%, 89%, 90%, 91%, 92%, 93%, 94%, 95%, 96%, 97%, 98%, or 99% sequence identity with any of the nucleic acid sequences represented by any one of SEQ ID NO: 266, 286, 316, 374, 376, 380, 424, 456, 458, 460, 462, 648, 650, 670, and 736; and any of the other nucleic acid sequences in Table F and further preferably conferring enhanced yield-related traits relative to control plants;
[0273] (v) a nucleic acid molecule which hybridizes with a nucleic acid molecule of (i) to (iv) under stringent hybridization conditions and preferably confers enhanced yield-related traits relative to control plants;
[0274] (vi) a nucleic acid encoding a polypeptide having, in increasing order of preference, at least 25%, 26%, 27%, 28%, 29%, 30%, 31%, 32%, 33%, 34%, 35%, 36%, 37%, 38%, 39%, 40%, 41%, 42%, 43%, 44%, 45%, 46%, 47%, 48%, 49%, 50%, 51%, 52%, 53%, 54%, 55%, 56%, 57%, 58%, 59%, 60%, 61%, 62%, 63%, 64%, 65%, 66%, 67%, 68%, 69%, 70%, 71%, 72%, 73%, 74%, 75%, 76%, 77%, 78%, 79%, 80%, 81%, 82%, 83%, 84%, 85%, 86%, 87%, 88%, 89%, 90%, 91%, 92%, 93%, 94%, 95%, 96%, 97%, 98%, or 99% sequence identity to the amino acid sequence represented by any one of SEQ ID NO: 267, 287, 317, 375, 377, 381, 425, 457, 459, 461, 463, 649, 651, 671 and 737 and any of the other amino acid sequences in Table F and preferably conferring enhanced yield-related traits relative to control plants.

[0275] According to another embodiment of the present invention, there is also provided an isolated polypeptide selected from:
[0276] (i) an amino acid sequence represented by any one of SEQ ID NO: 267, 287, 317, 375, 377, 381, 425, 457, 459, 461, 463, 649, 651, 671 and 737;
[0277] (ii) an amino acid sequence having, in increasing order of preference, at least 25%, 26%, 27%, 28%, 29%, 30%, 31%, 32%, 33%, 34%, 35%, 36%, 37%, 38%, 39%, 40%, 41%, 42%, 43%, 44%, 45%, 46%, 47%, 48%, 49%, 50%, 51%, 52%, 53%, 54%, 55%, 56%, 57%, 58%, 59%, 60%, 61%, 62%, 63%, 64%, 65%, 66%, 67%, 68%, 69%, 70%, 71%, 72%, 73%, 74%, 75%, 76%, 77%, 78%, 79%, 80%, 81%, 82%, 83%, 84%, 85%, 86%, 87%, 88%, 89%, 90%, 91%, 92%, 93%, 94%, 95%, 96%, 97%, 98%, or 99% sequence identity to the amino acid sequence represented by any one of SEQ ID NO: 267, 287, 317, 375, 377, 381, 425, 457, 459, 461, 463, 649, 651, 671 and 737, and any of the other amino acid sequences in Table F and preferably conferring enhanced yield-related traits relative to control plants, and
[0278] (iii) derivatives of any of the amino acid sequences given in (i) or (ii) above.

[0279] The invention hence also relates to the use of an isolated nucleic acid as provided above, or of an isolated polypeptide as provided above for enhancing yield-related traits in plants, and preferably wherein said yield-related traits are as defined herein, relative to control plants. Preferably said yield-related traits are as defined in herein relative to control plants. Further preferably said use involves a step of introducing in a plant, plant part or plant cell of such isolated nucleic acid or such isolated polypeptide as defined herein.

[0280] Nucleic acid variants may also be useful in practising the methods of the invention. Examples of such variants include nucleic acids encoding homologues and derivatives of any one of the amino acid sequences given in Table F of the Examples section, the terms “homologue” and “derivative” being as defined herein. Also useful in the methods of the invention are nucleic acids encoding homologues and derivatives of orthologues or paralogues of any one of the amino acid sequences given in Table F of the Examples section. Homologues and derivatives useful in the methods of the present invention have substantially the same biological and functional activity as the unmodified protein from which they are derived. Further variants useful in practising the methods of the invention are variants in which codon usage is optimised or in which miRNA target sites are removed.

[0281] Further nucleic acid variants useful in practising the methods of the invention include portions of nucleic acids encoding growth-related polypeptides, nucleic acids hybridising to nucleic acids encoding growth-related polypeptides, splice variants of nucleic acids encoding growth-related polypeptides, allelic variants of nucleic acids encoding growth-related polypeptides and variants of nucleic acids encoding growth-related polypeptides obtained by gene shuffling. The terms hybridising sequence, splice variant, allelic variant and gene shuffling are as described herein.

[0282] Nucleic acids encoding growth-related polypeptides need not be full-length nucleic acids, since performance of the methods of the invention does not rely on the use of full-length nucleic acid sequences. According to the present invention, there is provided a method for enhancing yield-related traits in plants, comprising introducing and expressing in a plant a portion of any one of the nucleic acid sequences given in Table F of the Examples section, or a portion of a nucleic acid encoding an orthologue, paralogue or homologue of any of the amino acid sequences given in Table F of the Examples section.

[0283] A portion of a nucleic acid may be prepared, for example, by making one or more deletions to the nucleic acid. The portions may be used in isolated form or they may be fused to other coding (or non-coding) sequences in order to, for example, produce a protein that combines several activities. When fused to other coding sequences, the resultant polypeptide produced upon translation may be bigger than that predicted for the protein portion.

[0284] Portions useful in the methods of the invention, encode a growth-related polypeptide as defined herein. Preferably, the portion is a portion of any one of the nucleic acids given in Table F of the Examples section, or is a portion of a nucleic acid encoding an orthologue or paralogue of any one of the amino acid sequences given in Table F of the Examples section. Preferably the portion is at least 150, 200, 250, 300, 350, 400, 450, 500, 550, 600, 650, 700, consecutive nucleotides in length, the consecutive nucleotides being of any one of the nucleic acid sequences given in Table F of the Examples section, or of a nucleic acid encoding an orthologue or paralogue of any one of the amino acid sequences given in Table F of the Examples section. Most preferably the portion is a portion of the nucleic acid of SEQ ID NO: 250. Preferably, the portion encodes a fragment of an amino acid sequence which has a motif having at least 70%, 71%, 72%, 73%, 74%, 75%, 76%, 77%, 78%, 79%, 80%, 81%, 82%, 83%, 84%, 85%, 86%, 87%, 88%, 89%, 90%, 91%, 92%, 93%, 94%, 95%, 96%, 97%, 98%, or 99% sequence identity to motif 7 and/or which has at least 25%, 26%, 27%, 28%, 29%, 30%, 31%, 32%, 33%, 34%, 35%, 36%, 37%, 38%, 39%, 40%, 41%, 42%, 43%, 44%, 45%, 46%, 47%, 48%, 49%, 50%, 51%, 52%, 53%, 54%, 55%, 56%, 57%, 58%, 59%, 60%, 61%, 62%, 63%, 64%, 65%, 66%, 67%, 68%, 69%, 70%, 71%, 72%, 73%, 74%, 75%, 76%, 77%, 78%, 79%, 80%, 81%, 82%, 83%, 84%, 85%, 86%, 87%, 88%, 89%, 90%, 91%, 92%, 93%, 94%, 95%, 96%, 97%, 98%, or 99% sequence identity to SEQ ID NO: 251.

[0285] Another nucleic acid variant useful in the methods of the invention is a nucleic acid capable of hybridising, under reduced stringency conditions, preferably under stringent conditions, with a nucleic acid encoding a GRP as defined herein, or with a portion as defined herein.

[0286] According to the present invention, there is provided a method for enhancing yield-related traits in plants, comprising introducing and expressing in a plant a nucleic acid capable of hybridizing to any one of the nucleic acids given in Table F of the Examples section, or comprising introducing and expressing in a plant a nucleic acid capable of hybridising to a nucleic acid encoding an orthologue, paralogue or homologue of any of the nucleic acid sequences given in Table F of the Examples section.

[0287] Hybridising sequences useful in the methods of the invention encode a GRP as defined herein, having substantially the same biological activity as the amino acid sequences given in Table F of the Examples section. Preferably, the hybridising sequence is capable of hybridising to the complement of any one of the nucleic acids given in Table F of the Examples section, or to a portion of any of these sequences, a portion being as defined above, or the hybridising sequence is capable of hybridising to the complement of a nucleic acid encoding an orthologue or paralogue of any one of the amino acid sequences given in Table F of the Examples section. Most preferably, the hybridising sequence is capable of hybridising to the complement of a nucleic acid as represented by SEQ ID NO: 250 or to a portion thereof.

[0288] Preferably, the hybridising sequence encodes a polypeptide with an amino acid sequence which has a motif having at least 70%, and for instance at least 75%, 80%, 85%, 90%, 95%, or 99% sequence identity to motif 7 as herein defined and/or which has at least 25%, and for instance at least 50%, 75%, 90%, or 95% sequence identity to SEQ ID NO: 251.

[0289] Another nucleic acid variant useful in the methods of the invention is a splice variant encoding a GRP as defined hereinabove, a splice variant being as defined herein.

[0290] According to the present invention, there is provided a method for enhancing yield-related traits in plants, comprising introducing and expressing in a plant a splice variant of any one of the nucleic acid sequences given in Table F of the Examples section, or a splice variant of a nucleic acid encoding an orthologue, paralogue or homologue of any of the amino acid sequences given in Table F of the Examples section.

[0291] Preferred splice variants are splice variants of a nucleic acid represented by SEQ ID NO: 250, or a splice variant of a nucleic acid encoding an orthologue or paralogue of SEQ ID NO: 251. Preferably, the amino acid sequence encoded by the splice variant has a motif having at least 70%, and for instance at least 75%, 80%, 85%, 90%, 95%, or 99% sequence identity to motif 7 as herein defined and/or has at least 25%, and for instance at least 50%, 75%, 90%, or 95% sequence identity to SEQ ID NO: 251.

[0292] Another nucleic acid variant useful in performing the methods of the invention is an allelic variant of a nucleic acid encoding a GRP as defined hereinabove, an allelic variant being as defined herein.

[0293] According to the present invention, there is provided a method for enhancing yield-related traits in plants, comprising introducing and expressing in a plant an allelic variant of any one of the nucleic acids given in Table F of the Examples section, or comprising introducing and expressing in a plant an allelic variant of a nucleic acid encoding an orthologue, paralogue or homologue of any of the amino acid sequences given in Table F of the Examples section.

[0294] The polypeptides encoded by allelic variants useful in the methods of the present invention have substantially the same biological activity as the GRP of SEQ ID NO: 251 and any of the amino acids depicted in Table F of the Examples section. Allelic variants exist in nature, and encompassed within the methods of the present invention is the use of these natural alleles. Preferably, the allelic variant is an allelic variant of SEQ ID NO: 250 or an allelic variant of a nucleic acid encoding an orthologue or paralogue of SEQ ID NO: 251. Preferably, the amino acid sequence encoded by the allelic variant has a motif having at least 70%, and for instance at least 75%, 80%, 85%, 90%, 95%, or 99% sequence identity to motif 7 as herein defined and/or has at least 25%, and for instance at least 50%, 75%, 90%, or 95% sequence identity to SEQ ID NO: 251.

[0295] Gene shuffling or directed evolution may also be used to generate variants of nucleic acids encoding GRP as defined above; the term “gene shuffling” being as defined herein.

[0296] According to the present invention, there is provided a method for enhancing yield-related traits in plants, comprising introducing and expressing in a plant a variant of any one of the nucleic acid sequences given in Table F of the Examples section, or comprising introducing and expressing in a plant a variant of a nucleic acid encoding an orthologue, paralogue or homologue of any of the amino acid sequences given in Table F of the Examples section, which variant nucleic acid is obtained by gene shuffling.

[0297] Preferably, the amino acid sequence encoded by the variant nucleic acid obtained by gene shuffling has a motif having at least 70%, and for instance at least 75%, 80%, 85%, 90%, 95%, or 99% sequence identity to motif 7 as herein defined and/or has at least 25%, and for instance at least 50%, 75%, 90%, or 95% sequence identity to SEQ ID NO: 251.

[0298] Furthermore, nucleic acid variants may also be obtained by site-directed mutagenesis. Several methods are available to achieve site-directed mutagenesis, the most common being PCR based methods (Current Protocols in Molecular Biology. Wiley Eds.).

[0299] Nucleic acids encoding GRP may be derived from any natural or artificial source. The nucleic acid may be modified from its native form in composition and/or genomic environment through deliberate human manipulation.

[0300] In an embodiment, the GRP-encoding nucleic acid is from a plant, further preferably from a monocotyledonous plant, more preferably from the family Poaceae, most preferably the nucleic acid is from Oryza sativa. In a preferred embodiment, said GRP-encoding nucleic acid encodes the polypeptide as represented by SEQ ID NO: 251.

[0301] In another embodiment, the GRP-encoding nucleic acid is from a plant, further preferably from a dicotyledonous plant, more preferably from the family Brassicaceae, most preferably the nucleic acid is from Arabidopsis thaliana. In another preferred embodiment, said GRP-encoding nucleic acid encodes a polypeptide as represented by any of SEQ ID NO: 275, 277 or 279, and preferably as represented by SEQ ID NO: 275.

[0302] Performance of the methods of the invention gives plants having enhanced yield-related traits. In one embodiment, reference herein to enhanced yield-related traits is taken to mean an increase in early vigour. Hence, in an embodiment, performance of the methods of the invention gives plants having early vigour relative to control plants.

[0303] In another embodiment, reference herein to enhanced yield-related traits is taken to mean an increase in biomass (weight) of one or more parts of a plant, which may include aboveground (harvestable) parts and/or (harvestable) parts below ground. In particular, such harvestable parts are seeds, and performance of the methods of the invention results in plants having increased seed yield relative to the seed yield of control plants.

[0304] In another embodiment, reference herein to enhanced yield-related traits is taken to mean an increase in yield, especially increased seed yield relative to control plants. The terms “yield” and “seed yield” are described in more detail in the “definitions” section herein. In a preferred embodiment, said increased seed yield is selected from any one or more of:
[0305] (i) increased harvest index;
[0306] (ii) increased total seed weight;
[0307] (iii) increased number of filled seeds;
[0308] (iv) number of flowers per panicle; and
[0309] (v) increased thousand kernel weight.

[0310] The present invention provides a method for increasing yield, especially seed yield of plants, relative to control plants, which method comprises modulating expression in a plant of a nucleic acid encoding a GRP as defined herein. In another embodiment, the present invention also provides a method for increasing biomass of plants, relative to control plants, which method comprises modulating expression in a plant of a nucleic acid encoding a GRP as defined herein. In yet another embodiment, the present invention also provides a method for increasing early vigour of plants, relative to control plants, which method comprises modulating expression in a plant of a nucleic acid encoding a GRP as defined herein. In another embodiment, according to the present invention, there is also provided a method for increasing the growth rate of plants, which method comprises modulating expression in a plant of a nucleic acid encoding a GRP polypeptide as defined herein.

[0311] Performance of the methods of the invention gives plants grown under non-stress conditions or under mild drought conditions increased yield relative to control plants grown under comparable conditions. Therefore, according to the present invention, there is provided a method for increasing yield in plants grown under non-stress conditions or under mild drought conditions, which method comprises modulating expression in a plant of a nucleic acid encoding a GRP as defined herein.

[0312] Performance of the methods of the invention gives plants grown under conditions of nutrient deficiency, particularly under conditions of nitrogen deficiency, increased yield relative to control plants grown under comparable conditions. Therefore, according to the present invention, there is provided a method for increasing yield in plants grown under conditions of nutrient deficiency, which method comprises modulating expression in a plant of a nucleic acid encoding a GRP as defined herein.

[0313] Performance of the methods of the invention gives plants grown under conditions of salt stress, increased yield relative to control plants grown under comparable conditions. Therefore, according to the present invention, there is provided a method for increasing yield in plants grown under conditions of salt stress, which method comprises modulating expression in a plant of a nucleic acid encoding a GRP as defined herein.

[0314] The invention also provides genetic constructs and vectors to facilitate introduction and/or expression in plants of nucleic acids encoding growth related polypeptides. The gene constructs may be inserted into vectors, which may be commercially available, suitable for transforming into plants and suitable for expression of the gene of interest in the transformed cells. The invention also provides use of a gene construct as defined herein in the methods of the invention.

[0315] More specifically, the present invention provides a construct comprising:
[0316] (a) a nucleic acid encoding a GRP as defined above;
[0317] (b) one or more control sequences capable of driving expression of the nucleic acid sequence of (a); and optionally
[0318] (c) a transcription termination sequence.

[0319] Preferably, the nucleic acid encoding a GRP is as defined above. The term “control sequence” and “termination sequence” are as defined herein.

[0320] The invention furthermore provides plants transformed with a construct as described above. In particular, the invention provides plants transformed with a construct as described above, which plants have increased yield-related traits as described herein.

[0321] In another embodiment, the invention also relates to the use of a construct as given herein in a method for making plants having enhanced yield-related traits, preferably yield-related traits as defined herein, relative to control plants. Preferably said use involves a step of introducing in a plant, plant part or plant cell plant of a construct as given above.

[0322] Plants are transformed with a vector comprising any of the nucleic acids described above. The skilled artisan is well aware of the genetic elements that must be present on the vector in order to successfully transform, select and propagate host cells containing the sequence of interest. The sequence of interest is operably linked to one or more control sequences, e.g. at least to a promoter.

[0323] Advantageously, any type of promoter, whether natural or synthetic, may be used to drive expression of the nucleic acid sequence, but preferably the promoter is of plant origin. A constitutive promoter is particularly useful in the methods. Preferably the constitutive promoter is a ubiquitous constitutive promoter of medium strength. See the “Definitions” section herein for definitions of the various promoter types.

[0324] It should be clear that the applicability of the present invention is not restricted to a GRP-encoding nucleic acid represented by SEQ ID NO: 250, nor is the applicability of the invention restricted to expression of a GRP-encoding nucleic acid when driven by a constitutive promoter.

[0325] The constitutive promoter is preferably a medium strength promoter. More preferably it is a plant derived promoter, such as a GOS2 promoter or a promoter of substantially the same strength and having substantially the same expression pattern (a functionally equivalent promoter). More preferably the promoter is the GOS2 promoter from rice. Further preferably the constitutive promoter is represented by a nucleic acid sequence substantially similar to SEQ ID NO: 744, most preferably the constitutive promoter is as represented by SEQ ID NO: 744. See the “Definitions” section herein for further examples of constitutive promoters.

[0326] Optionally, one or more terminator sequences may be used in the construct introduced into a plant. Preferably, the construct comprises an expression cassette comprising a GOS2 promoter, substantially similar to SEQ ID NO: 744, and the nucleic acid encoding the GRP. More preferably, the expression cassette comprises the sequence represented by SEQ ID NO: 745 (pGOS2::GRP::terminator). Furthermore, one or more sequences encoding selectable markers may be present on the construct introduced into a plant.

[0327] According to a preferred feature of the invention, the modulated expression is increased expression. Methods for increasing expression of nucleic acids or genes, or gene products, are well documented in the art and examples are provided in the definitions section.

[0328] As mentioned above, a preferred method for modulating expression of a nucleic acid encoding a GRP as given herein is by introducing and expressing in a plant a nucleic acid encoding a GRP as given herein; however the effects of performing the method, i.e. enhancing yield-related traits may also be achieved using other well known techniques, including but not limited to T-DNA activation tagging, TILLING, homologous recombination. A description of these techniques is provided in the definitions section.

[0329] The invention also provides a method for the production of transgenic plants having enhanced yield-related traits relative to control plants, comprising introduction and expression in a plant of any nucleic acid encoding a GRP as defined hereinabove.

[0330] More specifically, the present invention provides a method for the production of transgenic plants having enhanced yield-related traits, preferably such as those mentioned above, which method comprises:
[0331] (i) introducing and expressing in a plant or plant cell a GRP-encoding nucleic acid or a genetic construct comprising a GRP-encoding nucleic acid; and
[0332] (ii) cultivating the plant cell under conditions promoting plant growth and development.

[0333] Cultivating the plant cell under conditions promoting plant growth and development, may or may not include regeneration and or growth to maturity.

[0334] The nucleic acid of (i) may be any of the nucleic acids capable of encoding a GRP as defined herein.

[0335] The nucleic acid may be introduced directly into a plant cell or into the plant itself (including introduction into a tissue, organ or any other part of a plant). According to a preferred feature of the present invention, the nucleic acid is preferably introduced into a plant by transformation. The term “transformation” is described in more detail in the “definitions” section herein.

[0336] The present invention clearly extends to any plant cell or plant produced by any of the methods described herein, and to all plant parts and propagules thereof. The present invention encompasses plants or parts thereof including seeds obtainable by the methods according to the present invention. The plants or parts thereof comprise a nucleic acid transgene encoding a GRP as defined above. The present invention extends further to encompass the progeny of a primary transformed or transfected cell, tissue, organ or whole plant that has been produced by any of the aforementioned methods, the only requirement being that progeny exhibit the same genotypic and/or phenotypic characteristic(s) as those produced by the parent in the methods according to the invention.

[0337] The invention also includes host cells containing an isolated nucleic acid encoding a GRP as defined hereinabove. Preferred host cells according to the invention are plant cells. Host plants for the nucleic acids or the vector used in the method according to the invention, the expression cassette or construct or vector are, in principle, advantageously all plants, which are capable of synthesizing the polypeptides used in the inventive method.

[0338] In a preferred embodiment a growth-related polypeptide encoded by a nucleic acid according to the invention that has been introduced and expressed in a transgenic plant cell, plant part or plant when applying methods as described herein, may be present in all compartments of the plant cell including the cytosol. In a preferred embodiment, said growth-related polypeptide is located mitochondria or in chloroplast.

[0339] The methods of the invention are advantageously applicable to any plant, in particular to any plant as defined herein. Plants that are particularly useful in the methods of the invention include all plants which belong to the superfamily Viridiplantae, in particular monocotyledonous and dicotyledonous plants including fodder or forage legumes, ornamental plants, food crops, trees or shrubs.

[0340] According to an embodiment of the present invention, the plant is a crop plant. Examples of crop plants include but are not limited to chicory, carrot, cassava, trefoil, soybean, beet, sugar beet, sunflower, canola, alfalfa, rapeseed, linseed, cotton, tomato, potato and tobacco.

[0341] According to another embodiment of the present invention, the plant is a monocotyledonous plant. Examples of monocotyledonous plants include sugarcane.

[0342] According to another embodiment of the present invention, the plant is a cereal. Examples of cereals include rice, maize, wheat, barley, millet, rye, triticale, sorghum, emmer, spelt, secale, einkorn, teff, milo and oats.

[0343] The invention also extends to harvestable parts of a plant such as, but not limited to seeds, leaves, fruits, flowers, stems, roots, rhizomes, tubers and bulbs, which harvestable parts comprise a recombinant nucleic acid encoding a GRP. The invention furthermore relates to products derived, preferably directly derived, from a harvestable part of such a plant, such as dry pellets or powders, oil, fat and fatty acids, starch or proteins.

[0344] The present invention also encompasses use of nucleic acids encoding growth-related polypeptides as described herein and use of these polypeptides in enhancing any of the aforementioned yield-related traits in plants. For example, nucleic acids encoding a GRP described herein, or the GRP themselves, may find use in breeding programmes in which a DNA marker is identified which may be genetically linked to a GRP polypeptide-encoding gene. The nucleic acids/genes, or the GRP polypeptides themselves may be used to define a molecular marker. This DNA or protein marker may then be used in breeding programmes to select plants having enhanced yield-related traits as defined hereinabove in the methods of the invention. Furthermore, allelic variants of a GRP-encoding nucleic acid/gene may find use in marker-assisted breeding programmes. Nucleic acids encoding GRP may also be used as probes for genetically and physically mapping the genes that they are a part of, and as markers for traits linked to those genes. Such information may be useful in plant breeding in order to develop lines with desired phenotypes.

[0345] In another embodiment the invention relates to the use of a nucleic acid encoding a polypeptide as defined herein for enhancing yield-related traits in plants and preferably wherein said yield-related traits are as defined in herein relative to control plants. Preferably said use involves a step of introducing in a plant, plant part or plant cell of such nucleic acid as defined herein.

[0346] A “ZPR polypeptide” as defined herein refers to any polypeptide comprising a Leucine Zipper (ZIP) domain, and preferably comprises a Leucine Zipper (ZIP) domain that is six heptads in length.

[0347] The terms “domain”, “signature” and “motif” are defined in the “definitions” section herein.

[0348] ZPR proteins have high amino acid sequence similarities to the class III homeodomain-leucin zipper transcription factors (HD-ZIP Ills). However, the small proteins, designated little zippers (ZPRs), are structurally unique from the HD-ZIP Ills and other known transcription factors in that they have only the ZIP motif, which mediates protein-protein interactions, but lack the DNA-binding basic sequence region and the C-terminal activation domain (Wenkel et al. 2007). It is therefore unlikely that the ZPR proteins are functional transcription factors belonging to the HD-ZIP III subfamily.

[0349] In particular, in an embodiment, a ZPR protein as defined herein comprise a Leucine Zipper domain, herein also named ZIP or L-ZIP motif, similar to the leucine zipper domain present in HD-ZIPIII proteins (Wenkel et al. 2007). According to another embodiment, a ZPR protein as defined herein comprises a Leucine Zipper (ZIP) domain which is six heptads in length.

[0350] A leucine zipper is a common three-dimensional structural motif in proteins. The leucine zipper is a super-secondary structure that functions as a dimerization domain, and its presence generates adhesion forces in parallel alpha helices. (Landschulz et al., 1988, Science 240: 1759-1764). Leucine zipper domains are coiled-coil domains consisting of heptad repeats with a Leu residue in the “d” position (Landschulz et al., 1988). A single leucine zipper consists of multiple leucine residues at approximately 7-residue intervals, which forms an amphipathic alpha helix with a hydrophobic region running along one side. This hydrophobic region provides an area for dimerization, allowing the motifs to “zip” together. The main feature of the leucine zipper domain is the predominance of the common amino acid leucine at the d position of the heptad repeat. Each half of a leucine zipper consists of a short alpha-helix with a leucine residue at every seventh position. The standard 3.6-residues-per-turn alpha-helix structure changes slightly to become a 3.5-residues-per-turn alpha-helix. Known also as the heptad repeat, one leucine comes in direct contact with another leucine on the other strand every second turn.

[0351] The terms “heptad” and “heptad repeat” are used herein as synonyms and both refer to a structural motif that consists of a repeating pattern of seven amino acids. A heptad repeat can be schematically represented as follows: HPPHCPC, where H represents hydrophobic residues; C represents, typically, charged residues, and P represents polar and, therefore, hydrophilic residues. The positions of the heptad repeat are commonly denoted by the lowercase letters a through g. As indicated above, leucine zipper motifs predominantly have leucine in the d position of the heptad repeat (Landschulz et al., 1988).

[0352] In another embodiment, said leucine zipper domain comprises an amino acid sequence having at least 50%, 51%, 52%, 53%, 54%, 55%, 56%, 57%, 58%, 59%, 60%, 61%, 62%, 63%, 64%, 65%, 66%, 67%, 68%, 69%, 70%, 71%, 72%, 73%, 74%, 75%, 76%, 77%, 78%, 79%, 80%, 81%, 82%, 83%, 84%, 85%, 86%, 87%, 88%, 89%, 90%, 91%, 92%, 93%, 94%, 95%, 96%, 97%, 98%, 99% or 100% overall sequence identity to the amino acid sequence represented by SEQ ID NO: 936. In other words, in another embodiment a method is provided wherein said ZPR polypeptide comprises a conserved domain (or motif) with at least 50%, 51%, 52%, 53%, 54%, 55%, 56%, 57%, 58%, 59%, 60%, 61%, 62%, 63%, 64%, 65%, 66%, 67%, 68%, 69%, 70%, 71%, 72%, 73%, 74%, 75%, 76%, 77%, 78%, 79%, 80%, 81%, 82%, 83%, 84%, 85%, 86%, 87%, 88%, 89%, 90%, 91%, 92%, 93%, 94%, 95%, 96%, 97%, 98%, 99% or 100% sequence identity to the conserved domain starting with amino acid 59 up to and including amino acid 100 in SEQ ID NO:747.

[0353] ZPR proteins are structurally similar in that they possess a leucine zipper domain as described above. However ZPR proteins vary in the placement of the leucine zipper domain within the protein. For instance, in Arabidopsis, phylogenetic analysis (see FIG. 11 taken from Wenkel et al. 2007) revealed that ZPR proteins can be classified into two distinct groups. Class A proteins are ZPR1/2 like proteins and contain the leucine zipper domain centrally to C-terminally. This group includes ZPR1 and ZPR2. Class B proteins are ZPR3/4 like proteins and includes ZPR3 and ZPR4; they comprises the leucine zipper domain located in the N-terminal regions of ZPR3 and ZPR4 (see FIG. 10 taken from Wenkel et al. 2007). Moreover, both types of ZPR proteins, ZPR1/ZPR2 types and ZPR3/ZPR4 types, are present in rice and maize as well as in Arabidopsis, indicating that the two types of ZPR genes diverged prior to the split between monocots and eudicots (Wenkel et al. 2007).

[0354] In a preferred embodiment, the ZPR polypeptide sequence which when used in the construction of a phylogenetic tree such as the one shown in FIG. 11, clusters with the group ZPR1/ZPR2 types of ZPR polypeptides that comprise said leucine zipper domain in the central to C-terminal region of said ZPR polypeptides. In addition, preferably said ZPR polypeptide sequence clusters with the group of ZPR polypeptides that comprises the amino acid sequence represented by SEQ ID NO: 747 rather than with any other group.

[0355] In an embodiment, a ZPR polypeptide according to the invention comprises one or more of the following motifs:

| (SEQ ID NO: 929) | | |
|---|---|---|
| (i) | Motif 8: | II[EK]ENE[KR]LR[KE][KR]A[LS][LA]L[HR][QR]EN, |
| (SEQ ID NO: 930) | | |
| (ii) | Motif 9: | [EI]M[EK][MI]KNLKLY[EML]EN[KQ][SCI], |
| (SEQ ID NO: 931) | | |
| (iii) | Motif 10: | [QKL][AD]L[LF][ST][QE][LI][QI][KQ][KQ][LI]SxPx |

[0356] Motifs 8 to 10 can be found in ZPR polypeptides belonging to both of the above-mentioned phylogenic groups.

[0357] In another embodiment, a ZPR polypeptide according to the invention further comprises one or more of the following motifs:

| (SEQ ID NO: 932) | | |
|---|---|---|
| (i) | Motif 11: | K[VL][KA]K[EI]M[EK]MKNLKLY[MEL]EN[QKR][SIC]I[IL]EENE[KR]LR[KE] |
| | | [KRQ]A[LS][LA]L[HR][QR]EN[LKQ][AD]L[LF][STQ][QI][LI][QI][KQN][KQ][IF]S, |
| (SEQ ID NO: 933) | | |
| (ii) | Motif 12: | MC[HS][AG][SI]Sx[HS][LS][ES]S, |
| (SEQ ID NO: 934) | | |
| (iii) | Motif 13: | [VI][HS][RV]L[NK][LR]RR |

[0358] Motifs 11 to 13 can be found in ZPR polypeptides belonging to the above-mentioned phylogenic group of ZPR1/ZPR2 types of ZPR polypeptides.

[0359] Motifs 8 to 13 as provided herein are based on and were derived using the MEME algorithm (Bailey and Elkan, Proceedings of the Second International Conference on Intelligent Systems for Molecular Biology, pp. 28-36, AAAI Press, Menlo Park, Calif., 1994). At each position within a MEME motif, the residues are shown that are present in the query set of sequences with a frequency higher than 0.2. Residues within square brackets represent alternatives.

[0360] More preferably, the ZPR polypeptide comprises in increasing order of preference, at least 2, at least 3, at least 4, at least 5, or all 6 motifs.

[0361] The term “ZPR” or “ZPR polypeptide” or “ZPR protein” as used herein also intends to include homologues as defined hereunder of “ZPR polypeptide”.

[0362] Additionally or alternatively, the homologue of a ZPR protein has in increasing order of preference at least 25%, 26%, 27%, 28%, 29%, 30%, 31%, 32%, 33%, 34%, 35%, 36%, 37%, 38%, 39%, 40%, 41%, 42%, 43%, 44%, 45%, 46%, 47%, 48%, 49%, 50%, 51%, 52%, 53%, 54%, 55%, 56%, 57%, 58%, 59%, 60%, 61%, 62%, 63%, 64%, 65%, 66%, 67%, 68%, 69%, 70%, 71%, 72%, 73%, 74%, 75%, 76%, 77%, 78%, 79%, 80%, 81%, 82%, 83%, 84%, 85%, 86%, 87%, 88%, 89%, 90%, 91%, 92%, 93%, 94%, 95%, 96%, 97%, 98%, or 99% overall sequence identity to the amino acid represented by SEQ ID NO: 747, provided that the homologous protein comprises any one or more of the conserved motifs as outlined above. The overall sequence identity is determined using a global alignment algorithm, such as the Needleman Wunsch algorithm in the program GAP (GCG Wisconsin Package, Accelrys), preferably with default parameters and preferably with sequences of mature proteins (i.e. without taking into account secretion signals or transit peptides). Compared to overall sequence identity, the sequence identity will generally be higher when only conserved domains or motifs are considered. Preferably the motifs in a ZPR polypeptide have, in increasing order of preference, at least 70%, 71%, 72%, 73%, 74%, 75%, 76%, 77%, 78%, 79%, 80%, 81%, 82%, 83%, 84%, 85%, 86%, 87%, 88%, 89%, 90%, 91%, 92%, 93%, 94%, 95%, 96%, 97%, 98%, or 99% sequence identity to any one or more of the motifs represented by SEQ ID NO: 929 to SEQ ID NO: 934 (Motifs 8 to 13).

[0363] Homeodomain-leucine zipper (HD-ZIPIII) proteins activate transcription of the ZPR genes. The ZPR proteins then form heterodimers with the HD-ZIPIII proteins (Wenkel et al. 2007). Tools and techniques for measuring or determining activation of ZPR transcription are well known in the art. Further details are provided in Example 26.

[0364] In addition, ZPR polypeptides, when expressed in rice according to the methods of the present invention as outlined in Examples 27 and 28, give plants having increased yield related traits, in particular increased yield, and more particularly increased seed yield. In an embodiment, said increased seed yield relative to control plants comprises any one or more of increased fill rate, increased total seed weight, increased harvest index and increased number of filled seeds.

[0365] The present invention is illustrated by transforming plants with the nucleic acid sequence represented by SEQ ID NO: 746, encoding the polypeptide sequence of SEQ ID NO: 747. However, performance of the invention is not restricted to these sequences; the methods of the invention may advantageously be performed using any ZPR-encoding nucleic acid or ZPR polypeptide as defined herein.

[0366] Examples of nucleic acids encoding ZPR polypeptides are given in Table J of the Examples section herein. Such nucleic acids are useful in performing the methods of the invention. The amino acid sequences given in Table J of the Examples section includes example sequences of orthologues and paralogues of the ZPR polypeptide represented by SEQ ID NO: 747, the terms “orthologues” and “paralogues” being as defined herein. Further orthologues and paralogues may readily be identified by performing a so-called reciprocal blast search as described in the definitions section; where the query sequence is SEQ ID NO: 746 or SEQ ID NO: 747, the second BLAST (back-BLAST) would be against tomato sequences.

[0367] The invention also provides hitherto unknown ZPR-encoding nucleic acids and ZPR polypeptides useful for conferring enhanced yield-related traits as defined herein in plants relative to control plants.

[0368] According to one further embodiment of the present invention, there is therefore provided an isolated nucleic acid molecule selected from:
[0369] (i) a nucleic acid represented by any one of SEQ ID NO: 748, 790, 792, 862, 864, 870, 878, 902, 912, and 918;
[0370] (ii) the complement of a nucleic acid represented by any one of SEQ ID NO: 748, 790, 792, 862, 864, 870, 878, 902, 912, and 918;
[0371] (iii) a nucleic acid encoding a ZPR polypeptide having in increasing order of preference at least 50%, 51%, 52%, 53%, 54%, 55%, 56%, 57%, 58%, 59%, 60%, 61%, 62%, 63%, 64%, 65%, 66%, 67%, 68%, 69%, 70%, 71%, 72%, 73%, 74%, 75%, 76%, 77%, 78%, 79%, 80%, 81%, 82%, 83%, 84%, 85%, 86%, 87%, 88%, 89%, 90%, 91%, 92%, 93%, 94%, 95%, 96%, 97%, 98%, or 99% sequence identity to the amino acid sequence represented any one of SEQ ID NO: 749, 791, 793, 863, 865, 871, 879, 903, 913, and 919; and additionally or alternatively comprising one or more motifs having in increasing order of preference at least 50%, 55%, 60%, 65%, 70%, 75%, 80%, 85%, 90%, 95%, 96%, 97%, 98%, 99% or more sequence identity to any one or more of the motifs 8 to 13 as given in SEQ ID NO: 929 to SEQ ID NO: 934, and further preferably conferring enhanced yield-related traits relative to control plants;
[0372] (iv) a nucleic acid encoding a ZPR polypeptide having in increasing order of preference at least 50%, 51%, 52%, 53%, 54%, 55%, 56%, 57%, 58%, 59%, 60%, 61%, 62%, 63%, 64%, 65%, 66%, 67%, 68%, 69%, 70%, 71%, 72%, 73%, 74%, 75%, 76%, 77%, 78%, 79%, 80%, 81%, 82%, 83%, 84%, 85%, 86%, 87%, 88%, 89%, 90%, 91%, 92%, 93%, 94%, 95%, 96%, 97%, 98%, or 99% sequence identity to the amino acid sequence represented any one of SEQ ID NO: 878, 902, 912, and 918; and additionally or alternatively comprising one or more motifs having in increasing order of preference at least 50%, 55%, 60%, 65%, 70%, 75%, 80%, 85%, 90%, 95%, 96%, 97%, 98%, 99% or more sequence identity to any one or more of the motifs 8 to 10 as given in SEQ ID NO: 929 to SEQ ID NO: 931, and further preferably conferring enhanced yield-related traits relative to control plants.
[0373] (v) a nucleic acid molecule which hybridizes with a nucleic acid molecule of (i) to (iv) under high stringency hybridization conditions and preferably confers enhanced yield-related traits relative to control plants.

[0374] According to another further embodiment of the present invention, there is also provided an isolated polypeptide selected from:
[0375] (i) an amino acid sequence represented by any one of SEQ ID NO: 749, 791, 793, 863, 865, 871, 879, 903, 913, and 919;
[0376] (ii) an amino acid sequence having, in increasing order of preference, at least 25%, 26%, 27%, 28%, 29%, 30%, 31%, 32%, 33%, 34%, 35%, 36%, 37%, 38%, 39%, 40%, 41%, 42%, 43%, 44%, 45%, 46%, 47%, 48%, 49%, 50%, 51%, 52%, 53%, 54%, 55%, 56%, 57%, 58%, 59%, 60%, 61%, 62%, 63%, 64%, 65%, 66%, 67%, 68%, 69%, 70%, 71%, 72%, 73%, 74%, 75%, 76%, 77%, 78%, 79%, 80%, 81%, 82%, 83%, 84%, 85%, 86%, 87%, 88%, 89%, 90%, 91%, 92%, 93%, 94%, 95%, 96%, 97%, 98%, or 99% sequence identity to the amino acid sequence represented by SEQ ID NO: 749, 791, 793, 863, 865, and 871; and additionally or alternatively comprising one or more motifs having in increasing order of preference at least 50%, 55%, 60%, 65%, 70%, 75%, 80%, 85%, 90%, 95%, 96%, 97%, 98%, 99% or more sequence identity to any one or more of the motifs 8 to 13 given in SEQ ID NO: 929 to SEQ ID NO: 934, and further preferably conferring enhanced yield-related traits relative to control plants;
[0377] (iii) an amino acid sequence having, in increasing order of preference, at least 25%, 26%, 27%, 28%, 29%, 30%, 31%, 32%, 33%, 34%, 35%, 36%, 37%, 38%, 39%, 40%, 41%, 42%, 43%, 44%, 45%, 46%, 47%, 48%, 49%, 50%, 51%, 52%, 53%, 54%, 55%, 56%, 57%, 58%, 59%, 60%, 61%, 62%, 63%, 64%, 65%, 66%, 67%, 68%, 69%, 70%, 71%, 72%, 73%, 74%, 75%, 76%, 77%, 78%, 79%, 80%, 81%, 82%, 83%, 84%, 85%, 86%, 87%, 88%, 89%, 90%, 91%, 92%, 93%, 94%, 95%, 96%, 97%, 98%, or 99% sequence identity to the amino acid sequence represented by SEQ ID NO: 879, 903, 913, and 919; and additionally or alternatively comprising one or more motifs having in increasing order of preference at least 50%, 55%, 60%, 65%, 70%, 75%, 80%, 85%, 90%, 95%, 96%, 97%, 98%, 99% or more sequence identity to any one or more of the motifs 8 to 10 given in SEQ ID NO: 929 to SEQ ID NO: 931 and further preferably conferring enhanced yield-related traits relative to control plants;
[0378] (iv) derivatives of any of the amino acid sequences given in (i) to (iii) above.

[0379] Nucleic acid variants may also be useful in practicing the methods of the invention. Examples of such variants include nucleic acids encoding homologues and derivatives of any one of the amino acid sequences given in Table J of the Examples section, the terms “homologue” and “derivative” being as defined herein. Also useful in the methods of the invention are nucleic acids encoding homologues and derivatives of orthologues or paralogues of any one of the amino acid sequences given in Table J of the Examples section. Homologues and derivatives useful in the methods of the present invention have substantially the same biological and functional activity as the unmodified protein from which they are derived. Further variants useful in practicing the methods of the invention are variants in which codon usage is optimised or in which miRNA target sites are removed.

[0380] Further nucleic acid variants useful in practicing the methods of the invention include portions of nucleic acids encoding ZPR polypeptides, nucleic acids hybridising to nucleic acids encoding ZPR polypeptides, splice variants of nucleic acids encoding ZPR polypeptides, allelic variants of nucleic acids encoding ZPR polypeptides and variants of nucleic acids encoding ZPR polypeptides obtained by gene shuffling. The terms hybridising sequence, splice variant, allelic variant and gene shuffling are as described herein.

[0381] Nucleic acids encoding ZPR polypeptides need not be full-length nucleic acids, since performance of the methods of the invention does not rely on the use of full-length nucleic acid sequences. According to the present invention, there is provided a method for enhancing yield-related traits in plants, comprising introducing and expressing in a plant a portion of any one of the nucleic acid sequences given in Table J of the Examples section, or a portion of a nucleic acid encoding an orthologue, paralogue or homologue of any of the amino acid sequences given in Table J of the Examples section.

[0382] A portion of a nucleic acid may be prepared, for example, by making one or more deletions to the nucleic acid. The portions may be used in isolated form or they may be fused to other coding (or non-coding) sequences in order to, for example, produce a protein that combines several activities. When fused to other coding sequences, the resultant polypeptide produced upon translation may be bigger than that predicted for the protein portion.

[0383] Portions useful in the methods of the invention, encode a ZPR polypeptide as defined herein, and have substantially the same biological activity as the amino acid sequences given in Table J of the Examples section. Preferably, the portion is a portion of any one of the nucleic acids given in Table J of the Examples section, or is a portion of a nucleic acid encoding an orthologue or paralogue of any one of the amino acid sequences given in Table J of the Examples section. Preferably the portion is at least 150, 175, 200, 225, 250, 275, 300, 325, 350, 375, 400, 425, 450, 475, 500, 525, 530, or 537 consecutive nucleotides in length, the consecutive nucleotides being of any one of the nucleic acid sequences given in Table J of the Examples section, or of a nucleic acid encoding an orthologue or paralogue of any one of the amino acid sequences given in Table J of the Examples section. Most preferably the portion is a portion of the nucleic acid of SEQ ID NO: 746. Preferably, the portion encodes a fragment of an amino acid sequence which has one or more of the following characteristics:
[0384] when used in the construction of a phylogenetic tree, such as the one depicted in FIG. 11, clusters with the group of ZPR1/2 like polypeptides comprising the amino acid sequence represented by SEQ ID NO: 747 rather than with any other group;
[0385] comprises any one or more of the motifs 8 to 13 as provided herein,
[0386] has HD-ZIPIII-suppressing activity, and
[0387] has at least 25% sequence identity to SEQ ID NO: 747.

[0388] Another nucleic acid variant useful in the methods of the invention is a nucleic acid capable of hybridising, under reduced stringency conditions, preferably under stringent conditions, with a nucleic acid encoding a POI polypeptide as defined herein, or with a portion as defined herein.

[0389] According to the present invention, there is provided a method for enhancing yield-related traits in plants, comprising introducing and expressing in a plant a nucleic acid capable of hybridizing to any one of the nucleic acids given in Table J of the Examples section, or comprising introducing and expressing in a plant a nucleic acid capable of hybridising to a nucleic acid encoding an orthologue, paralogue or homologue of any of the nucleic acid sequences given in Table J of the Examples section.

[0390] Hybridising sequences useful in the methods of the invention encode a ZPR polypeptide as defined herein, having substantially the same biological activity as the amino acid sequences given in Table J of the Examples section. Preferably, the hybridising sequence is capable of hybridising to the complement of any one of the nucleic acids given in Table J of the Examples section, or to a portion of any of these sequences, a portion being as defined above, or the hybridising sequence is capable of hybridising to the complement of a nucleic acid encoding an orthologue or paralogue of any one of the amino acid sequences given in Table J of the Examples section. Most preferably, the hybridising sequence is capable of hybridising to the complement of a nucleic acid as represented by SEQ ID NO: 746 or to a portion thereof.

[0391] Preferably, the hybridising sequence encodes a polypeptide with an amino acid sequence which has one or more of the following characteristics:
[0392] when used in the construction of a phylogenetic tree, such as the one depicted in FIG. 11, clusters with the group of ZPR1/2 like polypeptides comprising the amino acid sequence represented by SEQ ID NO: 747 rather than with any other group;
[0393] comprises any one or more of the motifs 8 to 13 as provided herein,
[0394] has HD-ZIPIII-suppressing activity, and
[0395] has at least 25% sequence identity to SEQ ID NO: 747.

[0396] Another nucleic acid variant useful in the methods of the invention is a splice variant encoding a ZPRI polypeptide as defined hereinabove, a splice variant being as defined herein.

[0397] According to the present invention, there is provided a method for enhancing yield-related traits in plants, comprising introducing and expressing in a plant a splice variant of any one of the nucleic acid sequences given in Table J of the Examples section, or a splice variant of a nucleic acid encoding an orthologue, paralogue or homologue of any of the amino acid sequences given in Table J of the Examples section.

[0398] Preferred splice variants are splice variants of a nucleic acid represented by SEQ ID NO: 746, or a splice variant of a nucleic acid encoding an orthologue or paralogue of SEQ ID NO: 747. Preferably, the amino acid sequence encoded by the splice variant, has one or more of the following characteristics:
[0399] when used in the construction of a phylogenetic tree, such as the one depicted in FIG. 11, clusters with the group of ZPR1/2 like polypeptides comprising the amino acid sequence represented by SEQ ID NO: 747 rather than with any other group;
[0400] comprises any one or more of the motifs 8 to 13 as provided herein,
[0401] has HD-ZIPIII-suppressing activity, and
[0402] has at least 25% sequence identity to SEQ ID NO: 747.

[0403] Another nucleic acid variant useful in performing the methods of the invention is an allelic variant of a nucleic acid encoding a ZPR polypeptide as defined hereinabove, an allelic variant being as defined herein.

[0404] According to the present invention, there is provided a method for enhancing yield-related traits in plants, comprising introducing and expressing in a plant an allelic variant of any one of the nucleic acids given in Table J of the Examples section, or comprising introducing and expressing in a plant an allelic variant of a nucleic acid encoding an orthologue, paralogue or homologue of any of the amino acid sequences given in Table J of the Examples section.

[0405] The polypeptides encoded by allelic variants useful in the methods of the present invention have substantially the same biological activity as the ZPR polypeptide of SEQ ID NO: 747 and any of the amino acids depicted in Table J of the Examples section. Allelic variants exist in nature, and encompassed within the methods of the present invention is the use of these natural alleles. Preferably, the allelic variant is an allelic variant of SEQ ID NO: 746 or an allelic variant of a nucleic acid encoding an orthologue or paralogue of SEQ ID NO: 747. Preferably, the amino acid sequence encoded by the allelic variant, has one or more of the following characteristics:
[0406] when used in the construction of a phylogenetic tree, such as the one depicted in FIG. 11, clusters with the group of ZPR1/2 like polypeptides comprising the amino acid sequence represented by SEQ ID NO: 747 rather than with any other group;
[0407] comprises any one or more of the motifs 8 to 13 as provided herein,
[0408] has HD-ZIPIII-suppressing activity, and
[0409] has at least 25% sequence identity to SEQ ID NO: 747.

[0410] Gene shuffling or directed evolution may also be used to generate variants of nucleic acids encoding ZPR polypeptides as defined above; the term “gene shuffling” being as defined herein.

[0411] According to the present invention, there is provided a method for enhancing yield-related traits in plants, comprising introducing and expressing in a plant a variant of any one of the nucleic acid sequences given in Table J of the Examples section, or comprising introducing and expressing in a plant a variant of a nucleic acid encoding an orthologue, paralogue or homologue of any of the amino acid sequences given in Table J of the Examples section, which variant nucleic acid is obtained by gene shuffling.

[0412] Preferably, the amino acid sequence encoded by the variant nucleic acid obtained by gene shuffling, has one or more of the following characteristics:
[0413] when used in the construction of a phylogenetic tree, such as the one depicted in FIG. 11, clusters with the group of ZPR1/2 like polypeptides comprising the amino acid sequence represented by SEQ ID NO: 747 rather than with any other group;
[0414] comprises any one or more of the motifs 8 to 13 as provided herein,
[0415] has HD-ZIPIII-suppressing activity, and
[0416] has at least 25% sequence identity to SEQ ID NO: 747.

[0417] Furthermore, nucleic acid variants may also be obtained by site-directed mutagenesis. Several methods are available to achieve site-directed mutagenesis, the most common being PCR based methods (Current Protocols in Molecular Biology. Wiley Eds.).

[0418] Nucleic acids encoding ZPR polypeptides may be derived from any natural or artificial source. The nucleic acid may be modified from its native form in composition and/or genomic environment through deliberate human manipulation.

[0419] Preferably the ZPR polypeptide-encoding nucleic acid is from a plant, further preferably from a dicotyledonous plant, more preferably from the family Solanaceae. In a particularly preferred embodiment, said ZPR polypeptide-encoding nucleic acid is from the genus Solanum, most preferably from Solanum lycopersicum (synonym: Lycopersicum esculentum).

[0420] In another preferred embodiment, said ZPR polypeptide-encoding nucleic acid is from a plant, further preferably from a dicotyledonous plant, more preferably from the family Salicaceae, preferably from the genus Populus, most preferably from Populus trichocarpa.

[0421] Performance of the methods of the invention gives plants having enhanced yield-related traits. In particular performance of the methods of the invention gives plants having increased yield, especially increased seed yield relative to control plants. The terms “yield” and “seed yield” are described in more detail in the “definitions” section herein.

[0422] Reference herein to enhanced yield-related traits is taken to mean an increase in biomass (weight) of one or more parts of a plant, which may include (i) aboveground parts and preferably aboveground harvestable parts and/or (ii) parts below ground and preferably harvestable below ground. In particular, such harvestable parts are seeds, and performance of the methods of the invention results in plants having increased seed yield relative to the seed yield of control plants.

[0423] The present invention provides a method for increasing yield-related traits, particularly yield, more particularly seed yield of plants, relative to control plants, which method comprises modulating expression in a plant of a nucleic acid encoding a ZPR polypeptide as defined herein.

[0424] According to a preferred feature of the present invention, performance of the methods of the invention gives plants having an increased growth rate relative to control plants. Therefore, according to the present invention, there is provided a method for increasing the growth rate of plants, which method comprises modulating expression in a plant of a nucleic acid encoding a ZPR polypeptide as defined herein.

[0425] The methods of the present invention may be performed under non-stress conditions or under stress conditions as defined above.

[0426] In an embodiment, the methods of the present invention are performed under non-stress conditions.

[0427] For instance, performance of the methods of the invention gives plants grown under non-stress conditions or under mild drought conditions increased yield relative to control plants grown under comparable conditions. Therefore, according to the present invention, there is provided a method for increasing yield, preferably seed yield, in plants grown under non-stress conditions or under mild drought conditions, which method comprises modulating expression in a plant of a nucleic acid encoding a ZPR polypeptide.

[0428] In another embodiment, the methods of the present invention are performed under stress conditions.

[0429] In an example, the methods of the present invention are performed under stress conditions such as drought. Performance of the methods of the invention gives plants that are grown under drought conditions increased yield-related traits as provided herein relative to control plants grown under comparable conditions. Therefore, according to the present invention, there is provided a method for increasing yield-related traits in plants grown under stress conditions, and in particular grown under drought conditions, which method comprises modulating expression in a plant of a nucleic acid encoding a ZPR polypeptide as defined herein.

[0430] In another example, performance of the methods of the invention gives plants grown under conditions of nutrient deficiency, particularly under conditions of nitrogen deficiency, increased yield-related traits as provided herein relative to control plants grown under comparable conditions. Therefore, according to the present invention, there is provided a method for increasing yield-related traits as provided herein in plants grown under conditions of nutrient deficiency, which method comprises modulating expression in a plant of a nucleic acid encoding a ZPR polypeptide.

[0431] In yet another example, performance of the methods of the invention gives plants grown under conditions of salt stress, increased yield-related traits as provided herein relative to control plants grown under comparable conditions. Therefore, according to the present invention, there is provided a method for increasing yield-related traits as provided herein in plants grown under conditions of salt stress, which method comprises modulating expression in a plant of a nucleic acid encoding a ZPR polypeptide.

[0432] The invention also provides genetic constructs and vectors to facilitate introduction and/or expression in plants of nucleic acids encoding ZPR polypeptides. The gene constructs may be inserted into vectors, which may be commercially available, suitable for transforming into plants and suitable for expression of the gene of interest in the transformed cells. The invention also provides use of a gene construct as defined herein in the methods of the invention.

[0433] More specifically, the present invention provides a construct comprising:
[0434] (a) a nucleic acid encoding a ZPR polypeptide as defined above;
[0435] (b) one or more control sequences capable of driving expression of the nucleic acid sequence of (a); and optionally
[0436] (c) a transcription termination sequence.

[0437] Preferably, the nucleic acid encoding a ZPR polypeptide is as defined above. The term “control sequence” and “termination sequence” are as defined herein.

[0438] The invention furthermore provides plants transformed with a construct as described above. In particular, the invention provides plants transformed with a construct as described above, which plants have increased yield-related traits as described herein.

[0439] Plants are transformed with a vector comprising any of the nucleic acids described above. The skilled artisan is well aware of the genetic elements that must be present on the vector in order to successfully transform, select and propagate host cells containing the sequence of interest. The sequence of interest is operably linked to one or more control sequences (at least to a promoter).

[0440] Advantageously, any type of promoter, whether natural or synthetic, may be used to drive expression of the nucleic acid sequence, but preferably the promoter is of plant origin. A constitutive promoter is particularly useful in the methods. Preferably the constitutive promoter is a ubiquitous constitutive promoter of medium strength. See the “Definitions” section herein for definitions of the various promoter types.

[0441] It should be clear that the applicability of the present invention is not restricted to the ZPR polypeptide-encoding nucleic acid represented by SEQ ID NO: 746, nor is the applicability of the invention restricted to expression of a ZPR polypeptide-encoding nucleic acid when driven by a constitutive promoter.

[0442] In a preferred embodiment, the constitutive promoter is preferably a medium strength promoter. Preferably it is a plant derived promoter, more preferably it is a GOS2 promoter or a promoter of substantially the same strength and having substantially the same expression pattern (a functionally equivalent promoter). Even more preferably the promoter is the GOS2 promoter from rice. Further preferably the constitutive promoter is represented by a nucleic acid sequence substantially similar to SEQ ID NO: 928, most preferably the constitutive promoter is as represented by SEQ ID NO: 928. See the “Definitions” section herein for further examples of constitutive promoters.

[0443] Optionally, one or more terminator sequences may be used in the construct introduced into a plant. Preferably, the construct comprises an expression cassette comprising a GOS2 promoter, substantially similar to SEQ ID NO: 928, operably linked to the nucleic acid encoding the ZPR polypeptide. In on example, said expression cassette comprises the sequence that is at least 95% and for instance 96, 97, 98, 99 or 100% identical to the sequence represented by SEQ ID NO: 935 (pGOS2::ZPR::t-zein sequence). In another example, said expression cassette comprises a sequence that is at least 95% and for instance 96, 97, 98, 99 or 100% identical to the sequence represented by SEQ ID NO:937 (pGOS2::ZPR::terminator). Furthermore, one or more sequences encoding selectable markers may be present on the construct introduced into a plant.

[0444] According to a preferred feature of the invention, the modulated expression is increased expression. Methods for increasing expression of nucleic acids or genes, or gene products, are well documented in the art and examples are provided in the definitions section.

[0445] As mentioned above, a preferred method for modulating expression of a nucleic acid encoding a ZPR polypeptide is by introducing and expressing in a plant a nucleic acid encoding a ZPR polypeptide; however the effects of performing the method, i.e. enhancing yield-related traits may also be achieved using other well known techniques, including but not limited to T-DNA activation tagging, TILLING, homologous recombination. A description of these techniques is provided in the definitions section.

[0446] The invention also provides a method for the production of transgenic plants having enhanced yield-related traits as provided herein relative to control plants, comprising introduction and expression in a plant of any nucleic acid encoding a ZPR polypeptide as defined hereinabove.

[0447] More specifically, the present invention provides a method for the production of transgenic plants having enhanced yield-related traits relative to control plants, preferably increased yield relative to control plants, and more preferably increased seed yield relative to control plants, which method comprises:
[0448] (i) introducing and expressing in a plant or plant cell a ZPR polypeptide-encoding nucleic acid or a genetic construct comprising a ZPR polypeptide-encoding nucleic acid; and
[0449] (ii) cultivating the plant cell under conditions promoting plant growth and development.

[0450] Cultivating the plant cell under conditions promoting plant growth and development, may or may not include regeneration and or growth to maturity.

[0451] The nucleic acid of (i) may be any of the nucleic acids capable of encoding a ZPR polypeptide as defined herein.

[0452] The nucleic acid may be introduced directly into a plant cell or into the plant itself (including introduction into a tissue, organ or any other part of a plant). According to a preferred feature of the present invention, the nucleic acid is preferably introduced into a plant by transformation. The term “transformation” is described in more detail in the “definitions” section herein.

[0453] The present invention clearly extends to any plant cell or plant produced by any of the methods described herein, and to all plant parts and propagules thereof. The present invention encompasses plants or parts thereof (including seeds) obtainable by the methods according to the present invention. The plants or parts thereof comprise a nucleic acid transgene encoding a ZPR polypeptide as defined above. The present invention extends further to encompass the progeny of a primary transformed or transfected cell, tissue, organ or whole plant that has been produced by any of the aforementioned methods, the only requirement being that progeny exhibit the same genotypic and/or phenotypic characteristic(s) as those produced by the parent in the methods according to the invention.

[0454] The invention also includes host cells containing an isolated nucleic acid encoding a ZPR polypeptide as defined hereinabove. Preferred host cells according to the invention are plant cells. Host plants for the nucleic acids or the vector used in the method according to the invention, the expression cassette or construct or vector are, in principle, advantageously all plants, which are capable of synthesizing the polypeptides used in the inventive method.

[0455] The methods of the invention are advantageously applicable to any plant, in particular to any plant as defined herein. Plants that are particularly useful in the methods of the invention include all plants which belong to the superfamily Viridiplantae, in particular monocotyledonous and dicotyledonous plants including fodder or forage legumes, ornamental plants, food crops, trees or shrubs. Food crops may include for instance crop plants or cereals such as those provided herein.

[0456] According to an embodiment of the present invention, the plant is a crop plant. Examples of crop plants include but are not limited to chicory, carrot, cassava, trefoil, soybean, beet, sugar beet, sunflower, canola, alfalfa, rapeseed, linseed, cotton, tomato, potato and tobacco.

[0457] According to another embodiment of the present invention, the plant is a monocotyledonous plant. Examples of monocotyledonous plants include sugarcane.

[0458] According to another embodiment of the present invention, the plant is a cereal. Examples of cereals include rice, maize, wheat, barley, millet, rye, triticale, sorghum, emmer, spelt, secale, einkorn, teff, milo and oats.

[0459] The invention also extends to harvestable parts of a plant such as, but not limited to seeds, leaves, fruits, flowers, stems, roots, rhizomes, tubers and bulbs, which harvestable parts comprise a recombinant nucleic acid encoding a ZPR polypeptide. The invention furthermore relates to products derived, preferably directly derived, from a harvestable part of such a plant, such as dry pellets or powders, oil, fat and fatty acids, starch or proteins.

[0460] The present invention also encompasses use of nucleic acids encoding ZPRI polypeptides as described herein and use of these ZPR polypeptides in enhancing any of the aforementioned yield-related traits in plants. For example, nucleic acids encoding ZPR polypeptide described herein, or the ZPR polypeptides themselves, may find use in breeding programs in which a DNA marker is identified which may be genetically linked to a ZPR polypeptide-encoding gene. The nucleic acids/genes, or the ZPR polypeptides themselves may be used to define a molecular marker. This DNA or protein marker may then be used in breeding programs to select plants having enhanced yield-related traits as defined hereinabove in the methods of the invention. Furthermore, allelic variants of a ZPR polypeptide-encoding nucleic acid/gene may find use in marker-assisted breeding programs. Nucleic acids encoding ZPR polypeptides may also be used as probes for genetically and physically mapping the genes that they are a part of, and as markers for traits linked to those genes. Such information may be useful in plant breeding in order to develop lines with desired phenotypes.

### Items

[0461] The invention is further characterised by one or more of the following items:
[0462] 1. A method for enhancing yield-related traits in plants relative to control plants, comprising modulating expression in a plant of a nucleic acid encoding an OsRSZ33 RRM polypeptide, wherein said OsRSZ33 RRM polypeptide comprises from N- to C-terminus an RRM domain, two Zinc Knuckles.
[0463] 2. Method according to item 1, wherein said OsRSZ33 RRM polypeptide comprises one or more of the motifs 1 to 3 (SEQ ID NO: 241 to 246).
[0464] 3. Method according to item 1 or 2, wherein said modulated expression is effected by introducing and expressing in a plant a nucleic acid encoding an OsRSZ33 RRM polypeptide.
[0465] 4. Method according to any one of items 1 to 3, wherein said nucleic acid encoding an OsRSZ33 RRM polypeptide encodes any one of the proteins listed in Table A or is a portion of such a nucleic acid, or a nucleic acid capable of hybridising with such a nucleic acid.
[0466] 5. Method according to any one of items 1 to 4, wherein said nucleic acid sequence encodes an orthologue or paralogue of any of the proteins given in Table A.
[0467] 6. Method according to any preceding item, wherein said enhanced yield-related traits comprise increased yield and/or early vigour, relative to control plants.
[0468] 7. Method according to any one of items 1 to 6, wherein said enhanced yield-related traits are obtained under non-stress conditions.
[0469] 8. Method according to any one of items 3 to 7, wherein said nucleic acid is operably linked to a constitutive promoter, preferably to a GOS2 promoter, most preferably to a GOS2 promoter from rice.
[0470] 9. Method according to any one of items 1 to 8, wherein said nucleic acid encoding an OsRSZ33 RRM polypeptide is of plant origin, preferably from a dicotyledonous plant, further preferably from the family Poaceae, more preferably from the genus Oryza, most preferably from Oryza sativa.
[0471] 10. Plant or part thereof, including seeds, obtainable by a method according to any one of items 1 to 9, wherein said plant or part thereof comprises a recombinant nucleic acid encoding an OsRSZ33 RRM polypeptide.
[0472] 11. Construct comprising:
   [0473] (i) nucleic acid encoding an OsRSZ33 RRM polypeptide as defined in items 1 or 2;
   [0474] (ii) one or more control sequences capable of driving expression of the nucleic acid sequence of (a); and optionally (iii) a transcription termination sequence.
[0475] 12. Construct according to item 11, wherein one of said control sequences is a constitutive promoter, preferably a GOS2 promoter, most preferably a GOS2 promoter from rice.
[0476] 13. Use of a construct according to item 11 or 12 in a method for making plants having increased yield, particularly increased biomass and/or increased seed yield relative to control plants.
[0477] 14. Plant, plant part or plant cell transformed with a construct according to item 11 or 12.
[0478] 15. Method for the production of a transgenic plant having increased yield, particularly increased biomass and/or increased seed yield relative to control plants, comprising:
   [0479] (i) introducing and expressing in a plant a nucleic acid encoding an OsRSZ33 RRM polypeptide as defined in item 1 or 2; and
   [0480] (ii) cultivating the plant cell under conditions promoting plant growth and development.
[0481] 16. Transgenic plant having increased yield, particularly increased biomass and/or increased seed yield, relative to control plants, resulting from modulated expression of a nucleic acid encoding an OsRSZ33 RRM polypeptide as defined in item 1 or 2, or a transgenic plant cell derived from said transgenic plant.
[0482] 17. Transgenic plant according to item 10, 14 or 16, or a transgenic plant cell derived thereof, wherein said plant is a crop plant, such as beet or sugarbeet or alfalfa, or a monocot such as sugarcane, or a cereal, such as rice, maize, wheat, barley, millet, rye, triticale, sorghum emmer, spelt, secale, einkorn, teff, milo and oats.
[0483] 18. Harvestable parts of a plant according to item 17, wherein said harvestable parts are preferably shoot biomass and/or seeds.
[0484] 19. Products derived from a plant according to item 17 and/or from harvestable parts of a plant according to item 18.
[0485] 20. Use of a nucleic acid encoding an OsRSZ33 RRM polypeptide in increasing yield, particularly in increasing seed yield and/or shoot biomass in plants, relative to control plants.
[0486] 21. A method for enhancing yield-related traits in plants relative to control plants, comprising modulating expression in a plant of a nucleic acid encoding a growth-related protein (GRP) having at least 25% sequence identity to the amino acid sequence represented by SEQ ID NO: 251.
[0487] 22. Method according to item 21, wherein said modulated expression is effected by introducing and expressing said nucleic acid in a plant.
[0488] 23. Method according to item 21 or 22, wherein said enhanced yield-related trait comprises increased yield relative to control plants.
[0489] 24. Method according to item 23, wherein said increased yield comprises increased seed yield relative to control plants, and preferably said increased seed yield is selected from any one or more of:
   [0490] (i) increased harvest index;
   [0491] (ii) increased total seed weight;
   [0492] (iii) increased number of filled seeds; and
   [0493] (iv) increased thousand kernel weight.
[0494] 25. Method according to any of items 21 to 24, wherein said enhanced yield-related trait comprises increased biomass, and preferably increased aboveground biomass, relative to control plants.
[0495] 26. Method according to any one of items 21 to 25, wherein said enhanced yield-related traits are obtained under non-stress conditions.
[0496] 27. Method according to any one of items 21 to 25, wherein said enhanced yield-related traits are obtained under conditions of drought stress, salt stress or nitrogen deficiency.
[0497] 28. Method according to any of items 21 to 27, wherein said growth-related protein has a motif having at least 70% sequence identity to motif 7: [NHPS][SC][CR][RK]K[NK][VST][PD][GD][TAV][ST]F[VL][SE]DL[RK]DH[IM][HD]EFI[NH]AS[ASM]DEH[MRK][TH]C F[TK][KN]T[IL][KQ][KR]MF[GD]MS[KM][TAV]V[AT] (SEQ ID NO: 742).
[0498] 29. Method according to any one of items 21 to 28, wherein said nucleic acid encoding said polypeptide is of plant origin, preferably from a monocotyledonous plant, further preferably from the family Poaceae, more preferably from the genus Oryza, most preferably from Oryza sativa.
[0499] 30. Method according to any one of items 21 to 29, wherein said nucleic acid encodes any one of the polypeptides listed in Table F or is a portion of such a nucleic acid, or a nucleic acid capable of hybridising with such a nucleic acid.
[0500] 31. Method according to any one of items 21 to 30, wherein said nucleic acid encodes an orthologue or paralogue of any of the polypeptides given in Table F.
[0501] 32. Method according to any one of items 21 to 31, wherein said nucleic acid encodes the polypeptide as represented by SEQ ID NO: 251
[0502] 33. Method according to any one of items 21 to 32, wherein said nucleic acid is operably linked to a constitutive promoter, preferably to a medium strength constitutive promoter, preferably to a plant promoter, more preferably to a GOS2 promoter, most preferably to a GOS2 promoter from rice.
[0503] 34. Plant, plant part thereof, including seeds, or plant cell, obtainable by a method according to any one of items 21 to 33, wherein said plant, plant part or plant cell comprises a recombinant nucleic acid encoding a polypeptide as defined in any of items 21 and 28 to 32.
[0504] 35. Construct comprising:
   [0505] (i) a nucleic acid encoding a polypeptide as defined in any of items 21 and 28 to 32,
   [0506] (ii) one or more control sequences capable of driving expression of the nucleic acid sequence of (i); and optionally
   [0507] (iii) a transcription termination sequence.
[0508] 36. Construct according to item 35 wherein one of said control sequences is a constitutive promoter, preferably a medium strength constitutive promoter, preferably a plant promoter, more preferably a GOS2 promoter, most preferably a GOS2 promoter from rice.
[0509] 37. Use of a construct according to item 35 or 36 in a method for making plants having enhanced yield-related traits.
[0510] 38. Plant, plant part or plant cell transformed with a construct according to item 35 or 36.
[0511] 39. Method for the production of a transgenic plant having enhanced yield-related traits relative to control plants, comprising:
   [0512] (i) introducing and expressing in a plant cell or plant a nucleic acid encoding a polypeptide as defined in any of items 21 and 28 to 32; and
   [0513] (ii) cultivating said plant cell or plant under conditions promoting plant growth and development.
[0514] 40. Method according to item 39, wherein said enhanced yield-related traits are as defined in any of items 23 to 27.
[0515] 41. Transgenic plant having enhanced yield-related traits relative to control plants, preferably as defined in any of items 23 to 25 resulting from modulated expression of a nucleic acid encoding a polypeptide as defined in any of items 21 and 28 to 32 or a transgenic plant cell derived from said transgenic plant.
[0516] 42. Transgenic plant according to item 34, 38 or 41, or a transgenic plant cell derived therefrom, wherein said plant is a crop plant, such as beet, sugarbeet or alfalfa; or a monocotyledonous plant such as sugarcane; or a cereal, such as rice, maize, wheat, barley, millet, rye, triticale, sorghum, emmer, spelt, secale, einkorn, teff, milo or oats.
[0517] 43. Harvestable parts of a plant according to item 41 or 42 wherein said harvestable parts are preferably shoot biomass and/or seeds.
[0518] 44. Products derived from a plant according to item 41 or 42 and/or from harvestable parts of a plant according to item 43.
[0519] 45. Use of a nucleic acid encoding a polypeptide as defined in any of items 21 and 28 to 32 for enhancing yield-related traits in plants, and preferably wherein said yield-related traits are as defined in any of items 23 to 27, relative to control plants.
[0520] 46. An isolated nucleic acid selected from:
   [0521] (i) a nucleic acid represented by any one of SEQ ID NO: 266, 286, 316, 374, 376, 380, 424, 456, 458, 460, 462, 648, 650, 670, and 736;
   [0522] (ii) the complement of a nucleic acid represented by any one of SEQ ID NO: 266, 286, 316, 374, 376, 380, 424, 456, 458, 460, 462, 648, 650, 670, and 736;
   [0523] (iii) a nucleic acid encoding the polypeptide as represented by any one of SEQ ID NO: 267, 287, 317, 375, 377, 381, 425, 457, 459, 461, 463, 649, 651, 671 and 737, preferably as a result of the degeneracy of the genetic code, said isolated nucleic acid can be derived from a polypeptide sequence as represented by any one of SEQ ID NO: 267, 287, 317, 375, 377, 381, 425, 457, 459, 461, 463, 649, 651, 671 and 737 and further preferably confers enhanced yield-related traits relative to control plants;
   [0524] (iv) a nucleic acid having, in increasing order of preference at least 25%, 26%, 27%, 28%, 29%, 30%, 31%, 32%, 33%, 34%, 35%, 36%, 37%, 38%, 39%, 40%, 41%, 42%, 43%, 44%, 45%, 46%, 47%, 48%, 49%, 50%, 51%, 52%, 53%, 54%, 55%, 56%, 57%, 58%, 59%, 60%, 61%, 62%, 63%, 64%, 65%, 66%, 67%, 68%, 69%, 70%, 71%, 72%, 73%, 74%, 75%, 76%, 77%, 78%, 79%, 80%, 81%, 82%, 83%, 84%, 85%, 86%, 87%, 88%, 89%, 90%, 91%, 92%, 93%, 94%, 95%, 96%, 97%, 98%, or 99% sequence identity with any of the nucleic acid sequences represented by any one of SEQ ID NO: 266, 286, 316, 374, 376, 380, 424, 456, 458, 460, 462, 648, 650, 670, and 736; and any of the other nucleic acid sequences in Table F and further preferably conferring enhanced yield-related traits relative to control plants;
   [0525] (v) a nucleic acid molecule which hybridizes with a nucleic acid molecule of (i) to (iv) under stringent hybridization conditions and preferably confers enhanced yield-related traits relative to control plants;
   [0526] (vi) a nucleic acid encoding a polypeptide having, in increasing order of preference, at least 25%, 26%, 27%, 28%, 29%, 30%, 31%, 32%, 33%, 34%, 35%, 36%, 37%, 38%, 39%, 40%, 41%, 42%, 43%, 44%, 45%, 46%, 47%, 48%, 49%, 50%, 51%, 52%, 53%, 54%, 55%, 56%, 57%, 58%, 59%, 60%, 61%, 62%, 63%, 64%, 65%, 66%, 67%, 68%, 69%, 70%, 71%, 72%, 73%, 74%, 75%, 76%, 77%, 78%, 79%, 80%, 81%, 82%, 83%, 84%, 85%, 86%, 87%, 88%, 89%, 90%, 91%, 92%, 93%, 94%, 95%, 96%, 97%, 98%, or 99% sequence identity to the amino acid sequence represented by any one of SEQ ID NO: 267, 287, 317, 375, 377, 381, 425, 457, 549, 461, 463, 649, 651, 671 and 737 and any of the other amino acid sequences in Table F and preferably conferring enhanced yield-related traits relative to control plants.
[0527] 47. An isolated polypeptide selected from:
   [0528] (i) an amino acid sequence represented by any one of SEQ ID NO: 267, 287, 317, 375, 377, 381, 425, 457, 459, 461, 463, 649, 651, 671 and 737;
   [0529] (ii) an amino acid sequence having, in increasing order of preference, at least 25%, 26%, 27%, 28%, 29%, 30%, 31%, 32%, 33%, 34%, 35%, 36%, 37%, 38%, 39%, 40%, 41%, 42%, 43%, 44%, 45%, 46%, 47%, 48%, 49%, 50%, 51%, 52%, 53%, 54%, 55%, 56%, 57%, 58%, 59%, 60%, 61%, 62%, 63%, 64%, 65%, 66%, 67%, 68%, 69%, 70%, 71%, 72%, 73%, 74%, 75%, 76%, 77%, 78%, 79%, 80%, 81%, 82%, 83%, 84%, 85%, 86%, 87%, 88%, 89%, 90%, 91%, 92%, 93%, 94%, 95%, 96%, 97%, 98%, or 99% sequence identity to the amino acid sequence represented by any one of SEQ ID NO: 267, 287, 317, 375, 377, 381, 425, 457, 459, 461, 463, 649, 651, 671 and 737, and any of the other amino acid sequences in Table F and preferably conferring enhanced yield-related traits relative to control plants, and
   [0530] (iii) derivatives of any of the amino acid sequences given in (i) or (ii) above.
[0531] 48. Use of an isolated nucleic acid according to item 46, or of an isolated polypeptide according to item 47 for enhancing yield-related traits in plants, and preferably wherein said yield-related traits are as defined in any of items 23 to 27, relative to control plants.
[0532] 49. A method for enhancing yield-related traits in plants relative to control plants, comprising modulating expression in a plant of a nucleic acid encoding a ZPR polypeptide, wherein said ZPR polypeptide comprises a Leucine Zipper (ZIP) domain that is six heptads in length.
[0533] 50. Method according item 49, wherein said ZPR polypeptide comprises one or more of the following motifs:

| (SEQ ID NO: 929) | | |
|---|---|---|
| (i) | Motif 8: | II[EK]ENE[KR]LR[KE][KR]A[LS][LA]L[HR][QR]EN, |
| (SEQ ID NO: 930) | | |
| (ii) | Motif 9: | [EI]M[EK][MI]KNLKLY[EML]EN[KQ][SCI], |
| (SEQ ID NO: 931) | | |
| (iii) | Motif 10: | [QKL][AD]L[LF][ST][QE][LI][QI][KQ][KQ][LI]SxPx |

[0534] 51. Method according to item 49 or 50, wherein said Leucine Zipper domain is located in the central to C-terminal region of said ZPR polypeptide.
[0535] 52. Method according to any of items 49 to 51, wherein said ZPR polypeptide further comprises one or more of the following motifs:

| (SEQ ID NO: 932) | | |
|---|---|---|
| (i) | Motif 11: | K[VL][KA]K[EI]M[EK]MKNLKLY[MEL]EN[QKR][SIC]I[IL]EENE[KR]LR[KE] |
| | | [KRQ]A[LS][LA]L[HR][QR]EN[LKQ][AD]L[LF][STQ][QI][LI][QI][KQN][KQ][IF]S, |
| (SEQ ID NO: 933) | | |
| (ii) | Motif 12: | MC[HS][AG][SI]Sx[HS][LS][ES]S, |
| (SEQ ID NO: 934) | | |
| (iii) | Motif 13: | [VI][HS][RV]L[NK][LR]RR |

[0536] 53. Method according to any one of items 49 to 52, wherein said nucleic acid encoding a ZPR polypeptide is of plant origin, and preferably from a dicotyledonous plant.
[0537] 54. Method according to any one of items 49 to 53, wherein said nucleic acid encoding a ZPR polypeptide is from the family Solanaceae, more preferably from the genus Solanum, most preferably from Solanum lycopersicum.
[0538] 55. Method according to any one of items 49 to 54, wherein said nucleic acid encoding a ZPR polypeptide encodes any one of the polypeptides listed in Table J or is a portion of such a nucleic acid, or a nucleic acid capable of hybridising with such a nucleic acid.
[0539] 56. Method according to any one of items 49 to 55, wherein said nucleic acid sequence encoding a ZPR polypeptide encodes an orthologue or paralogue of any of the polypeptides given in Table J.
[0540] 57. Method according to any one of items 49 to 56, wherein said nucleic acid encodes the polypeptide represented by SEQ ID NO: 747 or a homologue thereof.
[0541] 58. Method according to any of items 49 to 57, wherein said modulated expression is effected by introducing and expressing in a plant said nucleic acid encoding said ZPR polypeptide.
[0542] 59. Method according to any one of items 49 to 58, wherein said enhanced yield-related traits comprise increased yield relative to control plants, and preferably increased seed yield relative to control plants.
[0543] 60. Method according to any one of items 49 to 59, wherein said enhanced yield-related traits are obtained under non-stress conditions.
[0544] 61. Method according to any one of items 49 to 59, wherein said enhanced yield-related traits are obtained under conditions of drought stress, salt stress or nitrogen deficiency.
[0545] 62. Method according to any one of items 49 to 61, wherein said nucleic acid is operably linked to a constitutive promoter, preferably to a medium strength constitutive promoter, preferably to a plant promoter, more preferably to a GOS2 promoter, most preferably to a GOS2 promoter from rice.
[0546] 63. Plant, plant part thereof, including seeds, or plant cell, obtainable by a method according to any one of items 49 to 62, wherein said plant, plant part or plant cell comprises a recombinant nucleic acid encoding a ZPR polypeptide as defined in any of items 49 to 57.
[0547] 64. Construct comprising:
   [0548] (i) nucleic acid encoding a ZPR as defined in any of items 49 to 57;
   [0549] (ii) one or more control sequences capable of driving expression of the nucleic acid sequence of (i); and optionally
   [0550] (iii) a transcription termination sequence.
[0551] 65. Construct according to item 64, wherein one of said control sequences is a constitutive promoter, preferably a medium strength constitutive promoter, more preferably a plant promoter
[0552] 66. Construct according to item 64 or 65, wherein one of said control sequences is a GOS2 promoter, preferably a GOS2 promoter from rice.
[0553] 67. Use of a construct according to any of items 64 to 66 in a method for making plants having enhanced yield-related traits, preferably increased yield relative to control plants, and more preferably increased seed yield relative to control plants.
[0554] 68. Plant, plant part or plant cell transformed with a construct according to any of items 64 to 66.
[0555] 69. Method for the production of a transgenic plant having enhanced yield-related traits relative to control plants, preferably increased yield relative to control plants, and more preferably increased seed yield relative to control plants, comprising:
   [0556] (i) introducing and expressing in a plant cell or plant a nucleic acid encoding a ZPR polypeptide as defined in any of items 49 to 57; or a genetic construct comprising a ZPR polypeptide-encoding nucleic acid as defined in any of items 64 to 66; and
   [0557] (ii) cultivating the plant cell under conditions promoting plant growth and development.
[0558] 70. Transgenic plant having enhanced yield-related traits relative to control plants, preferably increased yield relative to control plants, and more preferably increased seed yield relative to control plants, resulting from modulated expression of a nucleic acid encoding a ZPR polypeptide as defined in any of items 49 to 57 or a transgenic plant cell derived from said transgenic plant.
[0559] 71. Transgenic plant according to item 63, 68 or 70, or a transgenic plant cell derived therefrom, wherein said plant is a crop plant, such as beet, sugarbeet or alfalfa; or a monocotyledonous plant such as sugarcane; or a cereal, such as rice, maize, wheat, barley, millet, rye, triticale, sorghum, emmer, spelt, secale, einkorn, teff, milo or oats.
[0560] 72. Harvestable parts of a plant according to any of items 63, 68, 70 and 71, wherein said harvestable parts are seeds.
[0561] 73. Products derived from a plant according to any of items 63, 68, 70 and 71, and/or from harvestable parts of a plant according to item 72.
[0562] 74. An isolated nucleic molecule selected from:
   [0563] (i) a nucleic acid represented by any one of SEQ ID NO: 748, 790, 792, 862, 864, 870, 878, 902, 912, and 918;
   [0564] (ii) the complement of a nucleic acid represented by any one of SEQ ID NO: 748, 790, 792, 862, 864, 870, 878, 902, 912, and 918;
   [0565] (iii) a nucleic acid encoding a ZPR polypeptide having in increasing order of preference at least 50%, 51%, 52%, 53%, 54%, 55%, 56%, 57%, 58%, 59%, 60%, 61%, 62%, 63%, 64%, 65%, 66%, 67%, 68%, 69%, 70%, 71%, 72%, 73%, 74%, 75%, 76%, 77%, 78%, 79%, 80%, 81%, 82%, 83%, 84%, 85%, 86%, 87%, 88%, 89%, 90%, 91%, 92%, 93%, 94%, 95%, 96%, 97%, 98%, or 99% sequence identity to the amino acid sequence represented any one of SEQ ID NO: 749, 791, 793, 863, 865, and 871; and additionally or alternatively comprising one or more motifs having in increasing order of preference at least 50%, 55%, 60%, 65%, 70%, 75%, 80%, 85%, 90%, 95%, 96%, 97%, 98%, 99% or more sequence identity to any one or more of the motifs 1 to 6 as given in SEQ ID NO: 929 to SEQ ID NO: 934, and further preferably conferring enhanced yield-related traits relative to control plants;
   [0566] (iv) a nucleic acid encoding a ZPR polypeptide having in increasing order of preference at least 50%, 51%, 52%, 53%, 54%, 55%, 56%, 57%, 58%, 59%, 60%, 61%, 62%, 63%, 64%, 65%, 66%, 67%, 68%, 69%, 70%, 71%, 72%, 73%, 74%, 75%, 76%, 77%, 78%, 79%, 80%, 81%, 82%, 83%, 84%, 85%, 86%, 87%, 88%, 89%, 90%, 91%, 92%, 93%, 94%, 95%, 96%, 97%, 98%, or 99% sequence identity to the amino acid sequence represented any one of SEQ ID NO: 878, 902, 912, and 918; and additionally or alternatively comprising one or more motifs having in increasing order of preference at least 50%, 55%, 60%, 65%, 70%, 75%, 80%, 85%, 90%, 95%, 96%, 97%, 98%, 99% or more sequence identity to any one or more of the motifs 8 to 10 as given in SEQ ID NO: 929 to SEQ ID NO: 931, and further preferably conferring enhanced yield-related traits relative to control plants.
   [0567] (v) a nucleic acid molecule which hybridizes with a nucleic acid molecule of (i) to (iv) under high stringency hybridization conditions and preferably confers enhanced yield-related traits relative to control plants.
[0568] 75. An isolated polypeptide selected from:
   [0569] (i) an amino acid sequence represented by any one of SEQ ID NO: 749, 791, 793, 863, 865, 871, 879, 903, 913, and 919;
   [0570] (ii) an amino acid sequence having, in increasing order of preference, at least 25%, 26%, 27%, 28%, 29%, 30%, 31%, 32%, 33%, 34%, 35%, 36%, 37%, 38%, 39%, 40%, 41%, 42%, 43%, 44%, 45%, 46%, 47%, 48%, 49%, 50%, 51%, 52%, 53%, 54%, 55%, 56%, 57%, 58%, 59%, 60%, 61%, 62%, 63%, 64%, 65%, 66%, 67%, 68%, 69%, 70%, 71%, 72%, 73%, 74%, 75%, 76%, 77%, 78%, 79%, 80%, 81%, 82%, 83%, 84%, 85%, 86%, 87%, 88%, 89%, 90%, 91%, 92%, 93%, 94%, 95%, 96%, 97%, 98%, or 99% sequence identity to the amino acid sequence represented by SEQ ID NO: 749, 791, 793, 863, 865, and 871; and additionally or alternatively comprising one or more motifs having in increasing order of preference at least 50%, 55%, 60%, 65%, 70%, 75%, 80%, 85%, 90%, 95%, 96%, 97%, 98%, 99% or more sequence identity to any one or more of the motifs 8 to 13 given in SEQ ID NO: 929 to SEQ ID NO: 934, and further preferably conferring enhanced yield-related traits relative to control plants;
   [0571] (iii) an amino acid sequence having, in increasing order of preference, at least 25%, 26%, 27%, 28%, 29%, 30%, 31%, 32%, 33%, 34%, 35%, 36%, 37%, 38%, 39%, 40%, 41%, 42%, 43%, 44%, 45%, 46%, 47%, 48%, 49%, 50%, 51%, 52%, 53%, 54%, 55%, 56%, 57%, 58%, 59%, 60%, 61%, 62%, 63%, 64%, 65%, 66%, 67%, 68%, 69%, 70%, 71%, 72%, 73%, 74%, 75%, 76%, 77%, 78%, 79%, 80%, 81%, 82%, 83%, 84%, 85%, 86%, 87%, 88%, 89%, 90%, 91%, 92%, 93%, 94%, 95%, 96%, 97%, 98%, or 99% sequence identity to the amino acid sequence represented by SEQ ID NO: 879, 903, 913, and 919; and additionally or alternatively comprising one or more motifs having in increasing order of preference at least 50%, 55%, 60%, 65%, 70%, 75%, 80%, 85%, 90%, 95%, 96%, 97%, 98%, 99% or more sequence identity to any one or more of the motifs 8 to 10 given in SEQ ID NO: 929 to SEQ ID NO: 931, and further preferably conferring enhanced yield-related traits relative to control plants;
   [0572] (iv) derivatives of any of the amino acid sequences given in (i) to (iii) above.
[0573] 76. Use of a nucleic acid as defined in any of items 49 to 57 and 74 or of a nucleic acid encoding a ZPR polypeptide as defined in any of items 49 to 57 and 75 for enhancing yield-related traits in plants relative to control plants, preferably for increasing yield in plants relative to control plants, and more preferably for increasing seed yield in plants relative to control plants.

### DESCRIPTION OF FIGURES

[0574] The present invention will now be described with reference to the following figures in which:

[0575] FIG. 1 (a) represents a graphical overview of an OsRSZ33 RRM protein (Isshiki et al., 2006); (b) represents the domain structure of SEQ ID NO: 2 with the RRM domain in bold and the two Zinc knuckle domains in italics. The conserved motifs 1 to 3 are underlined and numbered. The position of the signature sequences are indicated by a dashed line.

[0576] FIG. 2 represents a multiple alignment of various OsRSZ33 RRM polypeptides. The asterisks indicate identical amino acids among the various protein sequences, colons represent highly conserved amino acid substitutions, and the dots represent less conserved amino acid substitution; on other positions there is no sequence conservation. These alignments can be used for defining further motifs, when using conserved amino acids.

[0577] FIG. 3 shows phylogenetic tree of OsRSZ33 RRM polypeptides and other SR proteins (Isshiki et al., 2006, supplemental FIG. 2).

[0578] The amino acid sequences of rice, Arabidopsis, and human SR proteins are aligned with ClustalW software. The accession numbers of the SR proteins shown are as follows: At SRp34/SR1, O22315; At SRp30, NP_{—}172386; At SRp34a, NP_{—}567235; At SRp34b, NP_{—}190512; At RSp31, P92964; At RSp40, P92965; At RSp41, P92966; At RSZp21, NP_{—}973901; At RSZp22, NP_{—}194886; At RSZp22a, NP_{—}180035; At RSZ32, NP_{—}190918 At RSZ33, NP_{—}973620; At SC35, NP_{—}201225; At SCL33, NP_{—}564685; At SCL30, NP_{—}567021; At SCL30a, NP_{—}187966; At SCL28, NP_{—}197382; Hs ASF/SF2, Q07955; Hs SC35, Q01130 and Hs 9G8, Q16629.

[0579] FIG. 4 represents the binary vector used for increased expression in Oryza sativa of an OsRSZ33 RRM-encoding nucleic acid under the control of a rice GOS2 promoter (pGOS2)

[0580] FIG. 5 details the domain consensus sequence for SM00360 and SM00340 as given in SMART.

[0581] FIG. 6 represents SEQ ID NO: 251 with indication of motif 7 (underlined).

[0582] FIG. 7 represents a multiple alignment of a representative list of growth-related polypeptides according to the invention. The asterisks indicate identical amino acids among the various protein sequences, colons represent highly conserved amino acid substitutions, and the dots represent less conserved amino acid substitution; on other positions there is no sequence conservation. These alignments can be used for defining further motifs, when using conserved amino acids.

[0583] FIG. 8 shows the MATGAT table for a representative list of growth-related polypeptides according to the invention (Example 14)

[0584] FIG. 9 represents the binary vector used for increased expression in Oryza sativa of a nucleic acid encoding a polypeptide according to the invention under the control of a rice GOS2 promoter (pGOS2).

[0585] FIG. 10 corresponds to FIG. 12(A) provided in Wenkel et al. (2007) and shows the placement of the leucine zipper domain (grey zone) in each of the four Arabidopsis ZPR proteins.

[0586] FIG. 11 corresponds to FIG. 12(D) provided in Wenkel et al. (2007) and shows a phylogenetic tree of all four Arabidopsis, five rice, and two maize ZPR proteins. Alignment of the ZPR proteins was performed using the ClustalW algorithm. Bayesian phylogenetic analysis was conducted on the aligned protein data set using Mr Bayes version 3.1.2 (Huelsenbeck and Ronquist, 2001 Bioinformatics 17: 754-755.). Default settings were used, and the program was allowed to run for 100,000 generations. Trees were summarized after discarding the first 25,000 generations. The number above each branch corresponds to the posterior probability for that node.

[0587] FIG. 12 represents the domain structure of SEQ ID NO: 747 with conserved motifs 8 to 13 and with indication of the Leucine Zipper domain.

[0588] FIG. 13 represents a multiple alignment of a representative number of ZPR polypeptides. In particular, the represented ZPR polypeptides are characterized in that the Leucine Zipper domain is located in the central to C-terminal region of said ZPR polypeptide. The ZPR polypeptide represented by SEQ ID NO:747 is indicated with a box. The Leucine Zipper domain is located between the amino acids at position 59 and 100 in this protein and is indicated with a box. The six different heptads are separated with black dotted lines. These alignments can be used for defining further motifs, when using conserved amino acids.

[0589] FIG. 14 shows the MATGAT table of Example 23 for a representative number of ZPR polypeptides. The represented ZPR polypeptides are indicated by the following numbering: 1. S.lycopersicum_TC205388, 2. A.hypogaea_EG373732, 3. A.lyrata_{—}322199, 4. A.lyrata_{—}899056, 5. A. thaliana_AT2G45450.1, 6. A.thaliana_AT3G60890.1, 7. A.trichopoda_CK765457, 8. B.napus_CD822359, 9. C.annuum_TC13916, 10. C.intybus_EH709619, 11. C.melo_EB715099, 12. C.sinensis_TC13047, 13. C.tinctorius_EL400918, 14. E.tef_DN482990, 15. E.tirucalli_BP956571, 16. G.hirsutum_DW501389, 17. G.hirsutum_DW518216, 18. G.hirsutum_TC163217, 19. G.hybrid_AJ765000, 20. G.max_Glyma01g34620.1, 21. G.max_Glyma09g40450.1, 22. G.max_GM06MC 39606_{—}50673886@ 38431, 23. G.max_GM06MSsu40h07.r_{—}46819511@70598, 24. G.max_TC281725, 25. G.max_TC286014, 26. G.max_TC305219, 27. L.perennis_TA2167_{—}43195, 28. L.sativa_TC25720, 29. L.serriola_DW114794, 30. L.serriola_DW122307, 31. L.virosa_DW156764, 32. M.domestica_TC51427, 33. N.tabacum_TC60414, 34. O.sativa_LOC_Os09g34890.1, 35. Os_ZPRa_Os09g0520500, 36. P.abies_AM172974, 37. P.deltoides_TA3399_{—}3696, 38. P.sitchensis_TA14065_{—}3332, 39. P.tremula_TA8085_{—}113636, 40. P.trichocarpa_{—}554264, 41. P.trichocarpa_{—}823907, 42. P.vulgaris_FE900059, 43. Pt_ZPR_small_Lzipper, 44. R.chinensis_BI978399, 45. S.bicolor_Sb02g030180.1, 46. S.hybrid_CF573336, 47. S.hybrid_CF575621, 48. S.lycopersicum_TC207895, 49. S.propinquum_TA5427_{—}132711, 50. S.tuberosum_EG011112, 51. S.tuberosum_TC176950, 52. T.cacao_CU522069, 53. T.cacao_TC3649, 54. T.cryptomerioides_DN975845, 55. Triphysaria_sp_TC4136, 56. V.vinifera_GSVIVT00001026001, 57. V.vinifera_GSVIVT00026366001, 58. Z.mays_BG842570, 59. Z.mays_c62174110 gm030403@15401, 60. Z.mays_c62219732 gm030403@9841, 61. Z.mays_TC477977, 62. Z.mays_TC529546, 63. Z.mays_ZM07MC28025_BFb0123H02@27941, 64. Zeama_ZmPC0129214_ZPRB

[0590] FIG. 15 represents the binary vector used for increased expression in Oryza sativa of a ZPR-encoding nucleic acid under the control of a rice GOS2 promoter (pGOS2).

### EXAMPLES

[0591] The present invention will now be described with reference to the following examples, which are by way of illustration alone. The following examples are not intended to completely define or otherwise limit the scope of the invention.

[0592] DNA manipulation: unless otherwise stated, recombinant DNA techniques are performed according to standard protocols described in (Sambrook (2001) Molecular Cloning: a laboratory manual, 3rd Edition Cold Spring Harbor Laboratory Press, CSH, New York) or in Volumes 1 and 2 of Ausubel et al. (1994), Current Protocols in Molecular Biology, Current Protocols. Standard materials and methods for plant molecular work are described in Plant Molecular Biology Labfax (1993) by R. D. D. Croy, published by BIOS Scientific Publications Ltd (UK) and Blackwell Scientific Publications (UK).

### Example 1

### Identification of Sequences Related to SEQ ID NO: 1 and SEQ ID NO: 2

[0593] Sequences (full length cDNA, ESTs or genomic) related to SEQ ID NO: 1 and SEQ ID NO: 2 were identified amongst those maintained in the Entrez Nucleotides database at the National Center for Biotechnology Information (NCBI) using database sequence search tools, such as the Basic Local Alignment Tool (BLAST) (Altschul et al. (1990) J. Mol. Biol. 215:403-410; and Altschul et al. (1997) Nucleic Acids Res. 25:3389-3402). The program is used to find regions of local similarity between sequences by comparing nucleic acid or polypeptide sequences to sequence databases and by calculating the statistical significance of matches. For example, the polypeptide encoded by the nucleic acid of SEQ ID NO: 1 was used for the TBLASTN algorithm, with default settings and the filter to ignore low complexity sequences set off. The output of the analysis was viewed by pairwise comparison, and ranked according to the probability score (E-value), where the score reflect the probability that a particular alignment occurs by chance (the lower the E-value, the more significant the hit). In addition to E-values, comparisons were also scored by percentage identity. Percentage identity refers to the number of identical nucleotides (or amino acids) between the two compared nucleic acid (or polypeptide) sequences over a particular length. In some instances, the default parameters may be adjusted to modify the stringency of the search. For example the E-value may be increased to show less stringent matches. This way, short nearly exact matches may be identified.

[0594] Table A provides a list of nucleic acid sequences related to SEQ ID NO: 1 and SEQ ID NO: 2.

TABLE A
Examples of OsRSZ33 RRM nucleic acids and polypeptides:

| | Nucleic | Polypeptide |
|---|---|---|
| | acid SEQ | SEQ |
| Name | ID NO: | ID NO: |
| O. sativa_LOC_Os05g02880.1#1 | 1 | 2 |
| S. officinarum_CA282538#1 | 3 | 4 |
| T. aestivum_TC361049#1 | 5 | 6 |
| G. hirsutum_ES798395#1 | 7 | 8 |
| P. virgatum_TC2491#1 | 9 | 10 |
| S. hybrid_CF570698#1 | 11 | 12 |
| G. max_Glyma19g35980.2#1 | 13 | 14 |
| G. max_Glyma19g35980.3#1 | 15 | 16 |
| P. trichocarpa_653760#1 | 17 | 18 |
| G. soja_BF598591#1 | 19 | 20 |
| N. tabacum_TC66751#1 | 21 | 22 |
| A. cepa_TC5720#1 | 23 | 24 |
| P. patens_TC43147#1 | 25 | 26 |
| T. turgidum_AJ612509#1 | 27 | 28 |
| B. rapa_DY010361#1 | 29 | 30 |
| O. sativa_LOC_Os01g06290.4#1 | 31 | 32 |
| T. aestivum_TC286992#1 | 33 | 34 |
| T. aestivum_TC350935#1 | 35 | 36 |
| H. annuus_TC43928#1 | 37 | 38 |
| P. persica_TC9991#1 | 39 | 40 |
| E. esula_TC6405#1 | 41 | 42 |
| B. napus_TC102852#1 | 43 | 44 |
| S. officinarum_CA177377#1 | 45 | 46 |
| S. tuberosum_TC163945#1 | 47 | 48 |
| L. sativa_DY982195#1 | 49 | 50 |
| C. sinensis_TC6225#1 | 51 | 52 |
| G. hirsutum_TC144987#1 | 53 | 54 |
| L. sativa_TC21129#1 | 55 | 56 |
| G. max_Glyma19g35980.4#1 | 57 | 58 |
| P. virgatum_TC49604#1 | 59 | 60 |
| B. napus_TC90802#1 | 61 | 62 |
| B. napus_TC87766#1 | 63 | 64 |
| C. clementina_TC16391#1 | 65 | 66 |
| N. tabacum_TC43449#1 | 67 | 68 |
| T. aestivum_TC316707#1 | 69 | 70 |
| N. benthamiana_TC15005#1 | 71 | 72 |
| H. vulgare_TC162354#1 | 73 | 74 |
| S. officinarum_TC86028#1 | 75 | 76 |
| T. aestivum_TC316886#1 | 77 | 78 |
| B. napus_TC84291#1 | 79 | 80 |
| A. lyrata_323893#1 | 81 | 82 |
| A. thaliana_AT3G53500.2#1 | 83 | 84 |
| G. hirsutum_TC137472#1 | 85 | 86 |
| C. clementina_TC23768#1 | 87 | 88 |
| F. vesca_TA9870_57918#1 | 89 | 90 |
| G. hirsutum_TC160567#1 | 91 | 92 |
| G. max_Glyma19g35980.5#1 | 93 | 94 |
| G. max_Glyma03g33260.1#1 | 95 | 96 |
| G. max_Glyma19g35980.1#1 | 97 | 98 |
| G. max_TC317123#1 | 99 | 100 |
| T. aestivum_TC347767#1 | 101 | 102 |
| A. thaliana_AT2G37340.1#1 | 103 | 104 |
| A. hypogaea_EG029774#1 | 105 | 106 |
| B. napus_TC73509#1 | 107 | 108 |
| B. napus_BN06MC04617_42261920@4606#1 | 109 | 110 |
| P. virgatum_TC14454#1 | 111 | 112 |
| Poptr_ATRSZ33 like | 113 | 114 |
| V. vinifera_GSVIVT00023097001#1 | 115 | 116 |
| C. clementina_TC39204#1 | 117 | 118 |
| B. napus_TC68381#1 | 119 | 120 |
| B. rapa_TA6039_3711#1 | 121 | 122 |
| C. clementina_TC34178#1 | 123 | 124 |
| P. vulgaris_TC8698#1 | 125 | 126 |
| S. bicolor_Sb03g005500.1#1 | 127 | 128 |
| C. canephora_TC3361#1 | 129 | 130 |
| G. max_Glyma19g35990.1#1 | 131 | 132 |
| G. max_TC324192#1 | 133 | 134 |
| G. max_GM06MC33050_sl61g01@32287#1 | 135 | 136 |
| G. max_TC321743#1 | 137 | 138 |
| I. batatas_TA3421_4120#1 | 139 | 140 |
| A. comosus_DT336917#1 | 141 | 142 |
| L. japonicus_TC42099#1 | 143 | 144 |
| N. tabacum_TC40467#1 | 145 | 146 |
| G. raimondii_TC4400#1 | 147 | 148 |
| A. officinalis_TA1321_4686#1 | 149 | 150 |
| G. hirsutum_TC163142#1 | 151 | 152 |
| S. tuberosum_TC164160#1 | 153 | 154 |
| T. cacao_TC5161#1 | 155 | 156 |
| G. hirsutum_TC134110#1 | 157 | 158 |
| F. vesca_TA9810_57918#1 | 159 | 160 |
| L. japonicus_TC37427#1 | 161 | 162 |
| Triphysaria_sp_TC3067#1 | 163 | 164 |
| V. vinifera_GSVIVT00029498001#1 | 165 | 166 |
| P. taeda_TA6650_3352#1 | 167 | 168 |
| P. trifoliata_TA5898_37690#1 | 169 | 170 |
| S. bicolor_Sb09g001920.1#1 | 171 | 172 |
| S. officinarum_TC107276#1 | 173 | 174 |
| B. napus_TC84359#1 | 175 | 176 |
| Aquilegia_sp_TC24323#1 | 177 | 178 |
| P. pinaster_TA3625_71647#1 | 179 | 180 |
| P. virgatum_TC32128#1 | 181 | 182 |
| Z. mays_TC518048#1 | 183 | 184 |
| Aquilegia_sp_TC24824#1 | 185 | 186 |
| P. sitchensis_TA11267_3332#1 | 187 | 188 |
| N. tabacum_TC53470#1 | 189 | 190 |
| H. vulgare_TC154362#1 | 191 | 192 |
| T. aestivum_TC279628#1 | 193 | 194 |
| O. sativa_LOC_Os01g06290.1#1 | 195 | 196 |
| Z. mays_c68511709gm030403@11445#1 | 197 | 198 |
| Z. mays_TC527608#1 | 199 | 200 |
| O. glaberrima_Og014036.01#1 | 201 | 202 |
| O. sativa_LOC_Os03g17710.2#1 | 203 | 204 |
| P. virgatum_TC27619#1 | 205 | 206 |
| P. patens_TC31165#1 | 207 | 208 |
| S. officinarum_TC76505#1 | 209 | 210 |
| Z. mays_ZM07MC13041_BFb0138E15@13012#1 | 211 | 212 |
| M. crystallinum_TC10341#1 | 213 | 214 |
| T. aestivum_TC300145#1 | 215 | 216 |
| T. monococcum_TA2060_4568#1 | 217 | 218 |
| C. clementina_TC11431#1 | 219 | 220 |
| H. vulgare_c62741371hv270303@6248#1 | 221 | 222 |
| T. aestivum_RSZ38 | 223 | 224 |
| Z. mays_c67261821gm030403@11244#1 | 225 | 226 |
| Z. mays_TC490304#1 | 227 | 228 |
| O. sativa_LOC_Os03g17710.1#1 | 229 | 230 |
| O. sativa_LOC_Os05g07000.1#1 | 231 | 232 |
| S. bicolor_Sb09g001910.1#1 | 233 | 234 |
| Z. mays_TC510523#1 | 235 | 236 |
| Z. mays_ZM07MC35249_BFb0381l21@35142#1 | 237 | 238 |
| S. officinarum_TC80184#1 | 239 | 240 |

[0595] Sequences have been tentatively assembled and publicly disclosed by research institutions, such as The Institute for Genomic Research (TIGR; beginning with TA). The Eukaryotic Gene Orthologs (EGO) database may be used to identify such related sequences, either by keyword search or by using the BLAST algorithm with the nucleic acid sequence or polypeptide sequence of interest. Special nucleic acid sequence databases have been created for particular organisms, such as by the Joint Genome Institute. Furthermore, access to proprietary databases, has allowed the identification of novel nucleic acid and polypeptide sequences.

### Example 2

### Alignment of OsRSZ33 RRM Polypeptide Sequences

[0596] An alignment of polypeptide sequences (FIG. 2) was performed using the ClustalW (2.0) algorithm of progressive alignment (Thompson et al. (1997) Nucleic Acids Res 25:4876-4882; Chenna et al. (2003). Nucleic Acids Res 31:3497-3500) with standard setting (slow alignment, similarity matrix: Gonnet, gap opening penalty 10, gap extension penalty: 0.2). Minor manual editing was done to further optimise the alignment. The alignment shows that the N-terminal half, up to the end of the Zn Knucle domains is highly conserved.

[0597] Combination of the information on the domains in FIG. 1 and the alignment can be used for identifying the various motifs in the homologues of SEQ ID NO: 2.

[0598] A phylogenetic tree of various SR polypeptides (FIG. 3) was constructed using a ClustalW alignment (Isshiki et al., 2006). The OsRSZ33 RRM polypeptides useful in the methods of the present invention all belong to the cluster with two Zn Knuckle domains.

### Example 3

### Calculation of Global Percentage Identity Between Polypeptide Sequences

[0599] Global percentages of similarity and identity between full length polypeptide sequences useful in performing the methods of the invention were determined using one of the methods available in the art, the MatGAT (Matrix Global Alignment Tool) software (BMC Bioinformatics. 2003 4:29. MatGAT: an application that generates similarity/identity matrices using protein or DNA sequences. Campanella J J, Bitincka L, Smalley J; software hosted by Ledion Bitincka). MatGAT software generates similarity/identity matrices for DNA or protein sequences without needing pre-alignment of the data. The program performs a series of pair-wise alignments using the Myers and Miller global alignment algorithm (with a gap opening penalty of 12, and a gap extension penalty of 2), calculates similarity and identity using for example Blosum 62 (for polypeptides), and then places the results in a distance matrix. Sequence similarity is shown in the bottom half of the dividing line and sequence identity is shown in the top half of the diagonal dividing line.

[0600] Parameters used in the comparison were: Scoring matrix: Blosum62, First Gap: 12, Extending Gap: 2.

[0601] Results of the software analysis are shown in Table B for the global similarity and identity over the full length sequences from several OsRSZ33 RRM polypeptides from monocotyledonous plants. The sequence identity (in %) between the OsRSZ33 RRM polypeptide sequences useful in performing the methods of the invention can be as low as 41%, but is generally higher than 50% compared to SEQ ID NO: 2.

TABLE B
MatGAT results for global similarity and identity over the full length of the polypeptide sequences.

| | 1 | 2 | 3 | 4 | 5 | 6 | 7 | 8 | 9 | 10 | 11 | 12 | 13 | 14 | 15 |
|---|---|---|---|---|---|---|---|---|---|---|---|---|---|---|---|
| 1. H.vulgare_@6248 | | 75.4 | 74.4 | 75.4 | 74.5 | 48.3 | 71.9 | 73.3 | 73.1 | 72.4 | 46.2 | 52.0 | 39.3 | 72.8 | 69.0 |
| 2. O.glaberrima_Og014036 | 83.5 | | 97.3 | 98.8 | 87.7 | 48.5 | 76.1 | 76.4 | 76.5 | 75.7 | 46.1 | 51.2 | 40.9 | 75.7 | 74.7 |
| 3. O.sativa_LOC_Os03g17710.1 | 83.3 | 97.6 | | 98.5 | 86.4 | 48.1 | 75.3 | 75.3 | 75.4 | 74.6 | 45.7 | 50.7 | 40.6 | 74.6 | 73.6 |
| 4. O.sativa_LOC_Os03g17710.2 | 83.8 | 99.1 | 98.5 | | 87.7 | 48.8 | 76.4 | 76.7 | 76.5 | 76.0 | 46.4 | 51.5 | 41.2 | 76.0 | 74.7 |
| 5. O.sativa_LOC_Os05g02880 | 81.1 | 90.9 | 89.9 | 91.2 | | 49.8 | 78.3 | 78.9 | 76.9 | 78.4 | 47.1 | 52.0 | 41.5 | 77.9 | 75.8 |
| 6. P.virgatum_TC2491 | 50.5 | 51.2 | 50.7 | 51.5 | 52.3 | | 48.2 | 52.5 | 45.7 | 53.2 | 90.3 | 67.6 | 73.0 | 52.9 | 46.2 |
| 7. P.virgatum_TC27619 | 80.2 | 82.4 | 81.8 | 83.0 | 83.3 | 50.6 | | 82.8 | 85.7 | 82.0 | 46.4 | 51.8 | 41.2 | 82.3 | 82.4 |
| 8. P.virgatum_TC32128 | 79.3 | 84.8 | 83.9 | 85.5 | 86.1 | 54.1 | 87.3 | | 80.1 | 91.5 | 50.0 | 55.7 | 41.1 | 91.1 | 78.1 |
| 9. S.bicolor_Sb09g001910 | 80.9 | 81.8 | 82.1 | 82.1 | 81.5 | 48.7 | 88.0 | 85.0 | | 77.8 | 44.9 | 49.6 | 41.9 | 77.3 | 86.9 |
| 10. S.bicolor_Sb09g001920 | 80.8 | 83.6 | 82.7 | 84.2 | 85.4 | 54.2 | 86.1 | 94.6 | 82.7 | | 52.6 | 58.3 | 42.3 | 98.1 | 75.7 |
| 11. S.hybrid_CF570698 | 48.6 | 49.1 | 48.7 | 49.4 | 50.2 | 93.7 | 48.2 | 51.6 | 47.2 | 52.9 | | 67.6 | 72.0 | 52.9 | 45.0 |
| 12. S.officinarum_CA177377 | 57.4 | 57.3 | 56.7 | 57.6 | 57.0 | 69.7 | 55.2 | 58.6 | 54.0 | 59.6 | 68.1 | | 54.2 | 59.3 | 50.5 |
| 13. S.officinarum_CA282538 | 40.5 | 41.8 | 41.5 | 42.1 | 42.4 | 77.6 | 42.1 | 43.9 | 42.2 | 44.2 | 76.6 | 57.1 | | 42.3 | 43.8 |
| 14. S.officinarum_TC107276 | 79.0 | 84.2 | 83.3 | 84.8 | 84.8 | 54.2 | 87.0 | 94.9 | 82.4 | 99.0 | 52.9 | 60.3 | 44.9 | | 76.0 |
| 15. S.officinarum_TC76505 | 79.0 | 81.3 | 80.6 | 81.6 | 81.0 | 49.5 | 85.8 | 83.7 | 88.9 | 81.6 | 48.6 | 55.3 | 44.1 | 82.2 | |
| 16. S.officinarum_TC80184 | 69.9 | 75.4 | 75.7 | 75.7 | 74.9 | 45.1 | 76.2 | 76.0 | 83.6 | 73.8 | 44.0 | 51.6 | 39.9 | 73.8 | 83.3 |
| 17. S.officinarum_TC86028 | 66.1 | 66.1 | 65.4 | 66.4 | 66.3 | 59.6 | 65.5 | 69.7 | 64.2 | 70.2 | 58.9 | 65.6 | 49.3 | 70.8 | 66.2 |
| 18. T.aestivum_TC286992 | 64.9 | 61.5 | 61.5 | 62.4 | 62.5 | 77.9 | 60.9 | 64.6 | 57.8 | 65.1 | 74.7 | 74.4 | 62.2 | 65.1 | 58.9 |
| 19. T.aestivum_TC300145 | 97.6 | 85.2 | 84.8 | 85.5 | 82.5 | 50.9 | 81.0 | 82.5 | 81.5 | 82.5 | 49.1 | 57.2 | 41.0 | 82.5 | 77.7 |
| 20. T.turgidum_AJ612509 | 60.1 | 57.6 | 57.0 | 57.9 | 58.5 | 83.7 | 57.3 | 60.5 | 54.3 | 60.9 | 79.8 | 73.9 | 66.5 | 60.6 | 55.6 |
| 21. T.aestivum_RSZ38 | 96.7 | 84.1 | 83.9 | 84.4 | 82.0 | 50.8 | 80.2 | 81.7 | 80.6 | 81.7 | 48.9 | 58.0 | 40.8 | 81.7 | 76.9 |
| 22. Z.mays_@11244 | 80.5 | 84.4 | 84.2 | 84.7 | 84.7 | 49.8 | 88.6 | 86.8 | 94.1 | 85.3 | 48.9 | 56.2 | 43.2 | 85.6 | 89.8 |
| 23. Z.mays_@11445 | 82.9 | 83.9 | 83.0 | 84.5 | 84.3 | 51.7 | 85.2 | 88.9 | 83.3 | 91.7 | 50.8 | 57.2 | 42.5 | 91.4 | 81.0 |
| 24. Z.mays_TC490304 | 80.5 | 84.4 | 84.2 | 84.7 | 84.7 | 49.8 | 88.6 | 86.8 | 94.1 | 85.3 | 48.9 | 56.2 | 43.2 | 85.6 | 89.8 |
| 25. Z.mays_TC510523 | 77.9 | 78.8 | 79.0 | 79.0 | 77.6 | 47.0 | 83.0 | 80.5 | 90.1 | 78.5 | 45.9 | 51.8 | 40.5 | 78.5 | 83.9 |
| 26. Z.mays_TC518048 | 79.9 | 82.4 | 81.5 | 83.0 | 84.2 | 53.5 | 85.8 | 92.7 | 81.5 | 95.5 | 52.2 | 59.9 | 43.6 | 95.9 | 80.4 |
| 27. Z.mays_TC527608 | 82.9 | 83.9 | 83.0 | 84.5 | 83.4 | 51.7 | 84.8 | 88.9 | 83.3 | 91.7 | 50.8 | 57.8 | 42.2 | 91.4 | 81.0 |
| 28. Z.mays_@13012 | 80.5 | 84.6 | 83.9 | 84.9 | 84.9 | 50.2 | 89.4 | 86.7 | 93.3 | 85.8 | 49.2 | 56.8 | 43.5 | 86.1 | 90.0 |
| 29. Z.mays_@35142 | 78.5 | 79.3 | 79.6 | 79.6 | 78.2 | 47.3 | 83.6 | 80.7 | 90.7 | 78.8 | 45.9 | 52.7 | 40.5 | 78.8 | 84.4 |

| | 16 | 17 | 18 | 19 | 20 | 21 | 22 | 23 | 24 | 25 | 26 | 27 | 28 | 29 |
|---|---|---|---|---|---|---|---|---|---|---|---|---|---|---|
| 1. H.vulgare_@6248 | 64.8 | 58.4 | 64.6 | 95.8 | 59.8 | 96.1 | 72.6 | 74.2 | 72.6 | 71.6 | 69.7 | 75.1 | 72.1 | 72.2 |
| 2. O.glaberrima_Og014036 | 69.1 | 56.4 | 57.8 | 75.7 | 54.5 | 75.2 | 77.0 | 74.1 | 77.0 | 73.8 | 73.7 | 75.3 | 77.2 | 74.4 |
| 3. O.sativa_LOC_Os03g17710.1 | 68.2 | 55.8 | 57.9 | 74.6 | 54.0 | 74.1 | 75.9 | 73.1 | 75.9 | 72.8 | 72.6 | 74.2 | 76.1 | 73.4 |
| 4. O.sativa_LOC_Os03g17710.2 | 69.1 | 56.7 | 58.7 | 75.7 | 54.8 | 75.2 | 77.0 | 74.4 | 77.0 | 73.8 | 74.0 | 75.6 | 77.2 | 74.4 |
| 5. O.sativa_LOC_Os05g02880 | 69.3 | 57.1 | 58.5 | 74.5 | 55.7 | 73.8 | 78.6 | 74.9 | 78.6 | 73.0 | 75.4 | 75.8 | 78.7 | 73.6 |
| 6. P.virgatum_TC2491 | 42.1 | 57.8 | 74.2 | 48.8 | 79.8 | 48.3 | 46.5 | 49.5 | 46.5 | 43.6 | 51.3 | 49.8 | 46.8 | 43.9 |
| 7. P.virgatum_TC27619 | 72.3 | 57.9 | 58.1 | 72.1 | 54.8 | 72.2 | 85.0 | 77.6 | 85.3 | 79.9 | 79.1 | 77.9 | 85.0 | 80.5 |
| 8. P.virgatum_TC32128 | 70.5 | 62.1 | 60.4 | 73.5 | 56.6 | 73.0 | 82.1 | 82.8 | 82.1 | 75.4 | 87.4 | 83.4 | 81.2 | 75.6 |
| 9. S.bicolor_Sb09g001910 | 78.9 | 55.1 | 54.8 | 71.9 | 51.6 | 72.8 | 91.5 | 75.9 | 91.8 | 87.9 | 74.2 | 76.5 | 91.0 | 88.5 |
| 10. S.bicolor_Sb09g001920 | 69.0 | 64.8 | 61.4 | 74.0 | 57.9 | 73.8 | 80.4 | 89.3 | 80.4 | 74.1 | 93.3 | 88.7 | 80.5 | 74.4 |
| 11. S.hybrid_CF570698 | 41.3 | 58.5 | 70.5 | 46.7 | 75.4 | 46.2 | 45.6 | 49.2 | 45.6 | 42.8 | 50.3 | 48.9 | 45.9 | 42.8 |
| 12. S.officinarum_CA177377 | 45.4 | 63.1 | 69.6 | 52.7 | 68.9 | 52.6 | 50.8 | 54.2 | 50.8 | 48.4 | 57.0 | 54.8 | 51.1 | 48.4 |
| 13. S.officinarum_CA282538 | 39.6 | 46.5 | 59.4 | 39.2 | 63.5 | 39.3 | 42.0 | 40.0 | 42.0 | 39.7 | 41.4 | 39.4 | 42.3 | 39.7 |
| 14. S.officinarum_TC107276 | 68.8 | 65.7 | 60.8 | 73.1 | 57.0 | 72.9 | 80.4 | 87.8 | 80.4 | 73.8 | 92.4 | 87.8 | 80.5 | 74.1 |
| 15. S.officinarum_TC76505 | 80.5 | 56.6 | 55.6 | 68.2 | 52.6 | 67.6 | 86.1 | 71.8 | 86.4 | 80.8 | 73.9 | 72.4 | 86.3 | 81.4 |
| 16. S.officinarum_TC80184 | | 51.5 | 50.8 | 64.1 | 47.3 | 64.8 | 76.2 | 67.1 | 76.5 | 76.4 | 65.5 | 67.7 | 75.4 | 76.6 |
| 17. S.officinarum_TC86028 | 60.1 | | 60.8 | 57.7 | 60.6 | 57.6 | 56.0 | 59.8 | 56.0 | 53.9 | 61.4 | 59.8 | 57.5 | 53.1 |
| 18. T.aestivum_TC286992 | 53.8 | 68.4 | | 65.1 | 92.6 | 65.2 | 56.1 | 58.1 | 56.1 | 53.5 | 60.1 | 59.0 | 56.5 | 53.8 |
| 19. T.aestivum_TC300145 | 69.9 | 64.5 | 65.4 | | 60.2 | 96.4 | 71.6 | 74.7 | 71.6 | 70.4 | 70.9 | 75.6 | 72.0 | 71.0 |
| 20. T.turgidum_AJ612509 | 50.5 | 66.3 | 92.6 | 60.5 | | 60.4 | 52.5 | 54.4 | 52.5 | 49.9 | 55.7 | 55.3 | 52.9 | 50.1 |
| 21. T.aestivum_RSZ38 | 70.5 | 67.0 | 65.2 | 97.9 | 60.4 | | 71.7 | 74.8 | 71.7 | 71.3 | 70.8 | 75.6 | 72.1 | 71.9 |
| 22. Z.mays_@11244 | 80.6 | 62.8 | 59.8 | 82.0 | 55.6 | 81.1 | | 76.0 | 99.7 | 84.2 | 76.9 | 76.3 | 98.8 | 84.8 |
| 23. Z.mays_@11445 | 73.5 | 66.8 | 62.8 | 84.6 | 58.5 | 83.8 | 84.1 | | 76.0 | 72.4 | 88.8 | 96.0 | 76.5 | 72.7 |
| 24. Z.mays_TC490304 | 80.6 | 62.8 | 59.8 | 82.0 | 55.6 | 81.1 | 100.0 | 84.1 | | 84.5 | 76.9 | 76.3 | 98.5 | 85.1 |
| 25. Z.mays_TC510523 | 80.3 | 61.5 | 56.7 | 78.2 | 53.0 | 77.9 | 87.3 | 77.9 | 87.3 | | 71.1 | 73.2 | 83.7 | 99.4 |
| 26. Z.mays_TC518048 | 72.4 | 69.7 | 65.0 | 81.6 | 60.2 | 81.1 | 83.8 | 91.4 | 83.8 | 77.6 | | 84.8 | 77.1 | 71.4 |
| 27. Z.mays_TC527608 | 73.5 | 66.8 | 62.8 | 84.6 | 58.5 | 83.8 | 84.1 | 98.8 | 84.1 | 77.9 | 90.2 | | 76.8 | 73.5 |
| 28. Z.mays_@13012 | 80.1 | 63.7 | 60.1 | 82.2 | 55.9 | 80.8 | 99.1 | 84.3 | 99.1 | 86.7 | 84.3 | 84.3 | | 84.2 |
| 29. Z.mays_@35142 | 80.6 | 61.8 | 56.9 | 78.8 | 53.3 | 78.5 | 87.8 | 78.2 | 87.8 | 99.4 | 77.9 | 78.2 | 87.3 | |

### Example 4

### Identification of Domains Comprised in Polypeptide Sequences Useful in Performing the Methods of the Invention

[0602] The Integrated Resource of Protein Families, Domains and Sites (InterPro) database is an integrated interface for the commonly used signature databases for text- and sequence-based searches. The InterPro database combines these databases, which use different methodologies and varying degrees of biological information about well-characterized proteins to derive protein signatures. Collaborating databases include SWISS-PROT, PROSITE, TrEMBL, PRINTS, ProDom and Pfam, Smart and TIGRFAMs. Pfam is a large collection of multiple sequence alignments and hidden Markov models covering many common protein domains and families. Pfam is hosted at the Sanger Institute server in the United Kingdom. Interpro is hosted at the European Bioinformatics Institute in the United Kingdom.

[0603] The results of the InterPro scan of the polypeptide sequence as represented by SEQ ID NO: 2 are presented in Table C.

TABLE C
InterPro scan results (major accession numbers) of the
polypeptide sequence as represented by SEQ ID NO: 2.

| Database | Number | Name | start | stop | p-value | Accession |
|---|---|---|---|---|---|---|
| ProfileScan | PS50158 | ZF_CCHC | 103 | 118 | 0.00E+00 | IPR001878 |
| ProfileScan | PS50158 | ZF_CCHC | 125 | 141 | 0.00E+00 | IPR001878 |
| Gene3D | G3DSA: 3.30.70.330 | a_b_plait_nuc_bd | 9 | 119 | 6.60E−07 | IPR012677 |
| superfamily | SSF54928 | SSF54928 | 3 | 103 | 2.40E−04 | NULL |
| HMMSmart | SM00343 | ZnF_C2HC | 103 | 119 | 6.00E+08 | IPR001878 |
| HMMSmart | SM00343 | ZnF_C2HC | 125 | 141 | 2.10E+08 | IPR001878 |
| HMMPanther | PTHR10548 | PTHR10548 | 10 | 281 | 7.10E−36 | NULL |
| HMMPanther | PTHR10548 | PTHR10548 | 10 | 281 | 7.10E−36 | NULL |
| superfamily | SSF57756 | SSF57756 | 90 | 145 | 4.30E+04 | NULL |
| ProfileScan | PS50102 | RRM | 11 | 81 | 0.00E+00 | IPR000504 |
| HMMPfam | PF00098 | zf-CCHC | 102 | 119 | 1.50E−03 | IPR001878 |
| HMMPfam | PF00098 | zf-CCHC | 124 | 141 | 1.30E−02 | IPR001878 |
| HMMPfam | PF00076 | RRM_1 | 13 | 75 | 7.60E+00 | IPR000504 |
| HMMSmart | SM00360 | RRM | 12 | 77 | 1.60E−06 | IPR000504 |

### Example 5

### Topology Prediction of the OsRSZ33 RRM Polypeptide Sequences

[0604] TargetP 1.1 predicts the subcellular location of eukaryotic proteins. The location assignment is based on the predicted presence of any of the N-terminal pre-sequences: chloroplast transit peptide (cTP), mitochondrial targeting peptide (mTP) or secretory pathway signal peptide (SP). Scores on which the final prediction is based are not really probabilities, and they do not necessarily add to one. However, the location with the highest score is the most likely according to TargetP, and the relationship between the scores (the reliability class) may be an indication of how certain the prediction is. The reliability class (RC) ranges from 1 to 5, where 1 indicates the strongest prediction. TargetP is maintained at the server of the Technical University of Denmark.

[0605] For the sequences predicted to contain an N-terminal presequence a potential cleavage site can also be predicted.

[0606] A number of parameters were selected, such as organism group (non-plant or plant), cutoff sets (none, predefined set of cutoffs, or user-specified set of cutoffs), and the calculation of prediction of cleavage sites (yes or no).

[0607] The results of TargetP 1.1 analysis of the polypeptide sequence as represented by SEQ ID NO: 2 are presented Table D. The “plant” organism group has been selected, no cutoffs defined, and the predicted length of the transit peptide requested. The subcellular localization of the polypeptide sequence as represented by SEQ ID NO: 2 is predicted to be the mitochondrion, no transit peptide is predicted.

TABLE D
TargetP 1.1 analysis of the polypeptide
sequence as represented by SEQ ID NO: 2.

| Name | Len | cTP | mTP | SP | other | Loc | RC | TPlen |
|---|---|---|---|---|---|---|---|---|
| OsRSZ33 | 323 | 0.020 | 0.914 | 0.012 | 0.270 | M | 2 | 46 |
| cutoff | | 0.000 | 0.000 | 0.000 | 0.000 | | | |

Abbreviations: Len, Length; cTP, Chloroplastic transit peptide; mTP, Mitochondrial transit peptide, SP, Secretory pathway signal peptide, other, Other subcellular targeting, Loc, Predicted Location; RC, Reliability class; TPlen, Predicted transit peptide length.

[0608] Many other algorithms can be used to perform such analyses, including:
[0609] ChloroP 1.1 hosted on the server of the Technical University of Denmark;
[0610] Protein Prowler Subcellular Localisation Predictor version 1.2 hosted on the server of the Institute for Molecular Bioscience, University of Queensland, Brisbane, Australia;
[0611] PENCE Proteome Analyst PA-GOSUB 2.5 hosted on the server of the University of Alberta, Edmonton, Alberta, Canada;
[0612] TMHMM, hosted on the server of the Technical University of Denmark
[0613] PSORT (URL: psort.org)
[0614] PLOC (Park and Kanehisa, Bioinformatics, 19, 1656-1663, 2003).

### Example 6

### Functional Assay for the OsRSZ33 RRM Polypeptide

[0615] OsRSZ33 RRM proteins are postulated to interact with other SR proteins. Reference is made to the yeast two-hybrid assay with atRSZ33 as described in Lopato et al. 2002 and to the pull-down assay described by Lorkovic et al. (Exp. Cell Res. 314, 3175-3186, 2008).

### Example 7

### Cloning of the OsRSZ33 RRM Encoding Nucleic Acid Sequence

[0616] The nucleic acid sequence was amplified by PCR using as template a custom-made Oryza sativa seedlings cDNA library (in pCMV Sport 6.0; Invitrogen, Paisley, UK). PCR was performed using Hifi Taq DNA polymerase in standard conditions, using 200 ng of template in a 50 μl PCR mix. The primers used were prm15077 (SEQ ID NO: 248; sense, start codon in bold): 5′-ggggacaagtttgtacaaaaaagcaggcttaaacaatgccgcgctatgatga-3′ and prm15078 (SEQ ID NO: 249; reverse, complementary): 5′-ggggaccactttgtacaagaaagctgggtactgcgattaa atttcaggct-3′, which include the AttB sites for Gateway recombination. The amplified PCR fragment was purified also using standard methods. The first step of the Gateway procedure, the BP reaction, was then performed, during which the PCR fragment recombined in vivo with the pDONR201 plasmid to produce, according to the Gateway terminology, an “entry clone”, pOsRSZ33 RRM. Plasmid pDONR201 was purchased from Invitrogen, as part of the Gateway® technology.

[0617] The entry clone comprising SEQ ID NO: 1 was then used in an LR reaction with a destination vector used for Oryza sativa transformation. This vector contained as functional elements within the T-DNA borders: a plant selectable marker; a screenable marker expression cassette; and a Gateway cassette intended for LR in vivo recombination with the nucleic acid sequence of interest already cloned in the entry clone. A rice GOS2 promoter (SEQ ID NO: 247) for constitutive expression was located upstream of this Gateway cassette.

[0618] After the LR recombination step, the resulting expression vector pGOS2::OsRSZ33 RRM (FIG. 4) was transformed into Agrobacterium strain LBA4044 according to methods well known in the art.

### Example 8

### Plant Transformation

### Rice Transformation

[0619] The Agrobacterium containing the expression vector was used to transform Oryza sativa plants. Mature dry seeds of the rice japonica cultivar Nipponbare were dehusked. Sterilization was carried out by incubating for one minute in 70% ethanol, followed by 30 minutes in 0.2% HgCl₂, followed by a 6 times 15 minutes wash with sterile distilled water. The sterile seeds were then germinated on a medium containing 2,4-D (callus induction medium). After incubation in the dark for four weeks, embryogenic, scutellum-derived calli were excised and propagated on the same medium. After two weeks, the calli were multiplied or propagated by subculture on the same medium for another 2 weeks. Embryogenic callus pieces were sub-cultured on fresh medium 3 days before co-cultivation (to boost cell division activity).

[0620] Agrobacterium strain LBA4404 containing the expression vector was used for co-cultivation. Agrobacterium was inoculated on AB medium with the appropriate antibiotics and cultured for 3 days at 28° C. The bacteria were then collected and suspended in liquid co-cultivation medium to a density (OD₆₀₀) of about 1. The suspension was then transferred to a Petri dish and the calli immersed in the suspension for 15 minutes. The callus tissues were then blotted dry on a filter paper and transferred to solidified, co-cultivation medium and incubated for 3 days in the dark at 25° C. Co-cultivated calli were grown on 2,4-D-containing medium for 4 weeks in the dark at 28° C. in the presence of a selection agent. During this period, rapidly growing resistant callus islands developed. After transfer of this material to a regeneration medium and incubation in the light, the embryogenic potential was released and shoots developed in the next four to five weeks. Shoots were excised from the calli and incubated for 2 to 3 weeks on an auxin-containing medium from which they were transferred to soil. Hardened shoots were grown under high humidity and short days in a greenhouse.

[0621] Approximately 35 independent TO rice transformants were generated for one construct. The primary transformants were transferred from a tissue culture chamber to a greenhouse. After a quantitative PCR analysis to verify copy number of the T-DNA insert, only single copy transgenic plants that exhibit tolerance to the selection agent were kept for harvest of T1 seed. Seeds were then harvested three to five months after transplanting. The method yielded single locus transformants at a rate of over 50% (Aldemita and Hodges1996, Chan et al. 1993, Hiei et al. 1994).

### Example 9

### Transformation of Other Crops

### Corn Transformation

[0622] Transformation of maize (Zea mays) is performed with a modification of the method described by Ishida et al. (1996) Nature Biotech 14(6): 745-50. Transformation is genotype-dependent in corn and only specific genotypes are amenable to transformation and regeneration. The inbred line A188 (University of Minnesota) or hybrids with A188 as a parent are good sources of donor material for transformation, but other genotypes can be used successfully as well. Ears are harvested from corn plant approximately 11 days after pollination (DAP) when the length of the immature embryo is about 1 to 1.2 mm. Immature embryos are cocultivated with Agrobacterium tumefaciens containing the expression vector, and transgenic plants are recovered through organogenesis. Excised embryos are grown on callus induction medium, then maize regeneration medium, containing the selection agent (for example imidazolinone but various selection markers can be used). The Petri plates are incubated in the light at 25° C. for 2-3 weeks, or until shoots develop. The green shoots are transferred from each embryo to maize rooting medium and incubated at 25° C. for 2-3 weeks, until roots develop. The rooted shoots are transplanted to soil in the greenhouse. T1 seeds are produced from plants that exhibit tolerance to the selection agent and that contain a single copy of the T-DNA insert.

### Wheat Transformation

[0623] Transformation of wheat is performed with the method described by Ishida et al. (1996) Nature Biotech 14(6): 745-50. The cultivar Bobwhite (available from CIMMYT, Mexico) is commonly used in transformation. Immature embryos are co-cultivated with Agrobacterium tumefaciens containing the expression vector, and transgenic plants are recovered through organogenesis. After incubation with Agrobacterium, the embryos are grown in vitro on callus induction medium, then regeneration medium, containing the selection agent (for example imidazolinone but various selection markers can be used). The Petri plates are incubated in the light at 25° C. for 2-3 weeks, or until shoots develop. The green shoots are transferred from each embryo to rooting medium and incubated at 25° C. for 2-3 weeks, until roots develop. The rooted shoots are transplanted to soil in the greenhouse. T1 seeds are produced from plants that exhibit tolerance to the selection agent and that contain a single copy of the T-DNA insert.

### Soybean Transformation

[0624] Soybean is transformed according to a modification of the method described in the Texas A&M U.S. Pat. No. 5,164,310. Several commercial soybean varieties are amenable to transformation by this method. The cultivar Jack (available from the Illinois Seed foundation) is commonly used for transformation. Soybean seeds are sterilised for in vitro sowing. The hypocotyl, the radicle and one cotyledon are excised from seven-day old young seedlings. The epicotyl and the remaining cotyledon are further grown to develop axillary nodes. These axillary nodes are excised and incubated with Agrobacterium tumefaciens containing the expression vector. After the cocultivation treatment, the explants are washed and transferred to selection media. Regenerated shoots are excised and placed on a shoot elongation medium. Shoots no longer than 1 cm are placed on rooting medium until roots develop. The rooted shoots are transplanted to soil in the greenhouse. T1 seeds are produced from plants that exhibit tolerance to the selection agent and that contain a single copy of the T-DNA insert.

### Rapeseed/Canola Transformation

[0625] Cotyledonary petioles and hypocotyls of 5-6 day old young seedling are used as explants for tissue culture and transformed according to Babic et al. (1998, Plant Cell Rep 17: 183-188). The commercial cultivar Westar (Agriculture Canada) is the standard variety used for transformation, but other varieties can also be used. Canola seeds are surface-sterilized for in vitro sowing. The cotyledon petiole explants with the cotyledon attached are excised from the in vitro seedlings, and inoculated with Agrobacterium (containing the expression vector) by dipping the cut end of the petiole explant into the bacterial suspension. The explants are then cultured for 2 days on MSBAP-3 medium containing 3 mg/l BAP, 3% sucrose, 0.7 Phytagar at 23° C., 16 hr light. After two days of co-cultivation with Agrobacterium, the petiole explants are transferred to MSBAP-3 medium containing 3 mg/l BAP, cefotaxime, carbenicillin, or timentin (300 mg/l) for 7 days, and then cultured on MSBAP-3 medium with cefotaxime, carbenicillin, or timentin and selection agent until shoot regeneration. When the shoots are 5-10 mm in length, they are cut and transferred to shoot elongation medium (MSBAP-0.5, containing 0.5 mg/l BAP). Shoots of about 2 cm in length are transferred to the rooting medium (MS0) for root induction. The rooted shoots are transplanted to soil in the greenhouse. T1 seeds are produced from plants that exhibit tolerance to the selection agent and that contain a single copy of the T-DNA insert.

### Alfalfa Transformation

[0626] A regenerating clone of alfalfa (Medicago sativa) is transformed using the method of (McKersie et al., 1999 Plant Physiol 119: 839-847). Regeneration and transformation of alfalfa is genotype dependent and therefore a regenerating plant is required. Methods to obtain regenerating plants have been described. For example, these can be selected from the cultivar Rangelander (Agriculture Canada) or any other commercial alfalfa variety as described by Brown D C W and A Atanassov (1985. Plant Cell Tissue Organ Culture 4: 111-112). Alternatively, the RA3 variety (University of Wisconsin) has been selected for use in tissue culture (Walker et al., 1978 Am J Bot 65:654-659). Petiole explants are cocultivated with an overnight culture of Agrobacterium tumefaciens C58C1 pMP90 (McKersie et al., 1999 Plant Physiol 119: 839-847) or LBA4404 containing the expression vector. The explants are cocultivated for 3 d in the dark on SH induction medium containing 288 mg/L Pro, 53 mg/L thioproline, 4.35 g/L K2504, and 100 μm acetosyringinone. The explants are washed in half-strength Murashige-Skoog medium (Murashige and Skoog, 1962) and plated on the same SH induction medium without acetosyringinone but with a suitable selection agent and suitable antibiotic to inhibit Agrobacterium growth. After several weeks, somatic embryos are transferred to BOi2Y development medium containing no growth regulators, no antibiotics, and 50 g/L sucrose. Somatic embryos are subsequently germinated on half-strength Murashige-Skoog medium. Rooted seedlings were transplanted into pots and grown in a greenhouse. T1 seeds are produced from plants that exhibit tolerance to the selection agent and that contain a single copy of the T-DNA insert.

### Cotton Transformation

[0627] Cotton is transformed using Agrobacterium tumefaciens according to the method described in U.S. Pat. No. 5,159,135. Cotton seeds are surface sterilised in 3% sodium hypochlorite solution during 20 minutes and washed in distilled water with 500 μg/ml cefotaxime. The seeds are then transferred to SH-medium with 50 μg/ml benomyl for germination. Hypocotyls of 4 to 6 days old seedlings are removed, cut into 0.5 cm pieces and are placed on 0.8% agar. An Agrobacterium suspension (approx. 108 cells per ml, diluted from an overnight culture transformed with the gene of interest and suitable selection markers) is used for inoculation of the hypocotyl explants. After 3 days at room temperature and lighting, the tissues are transferred to a solid medium (1.6 g/l Gelrite) with Murashige and Skoog salts with B5 vitamins (Gamborg et al., Exp. Cell Res. 50:151-158 (1968)), 0.1 mg/l 2,4-D, 0.1 mg/l 6-furfurylaminopurine and 750 μg/ml MgCL2, and with 50 to 100 μg/ml cefotaxime and 400-500 μg/ml carbenicillin to kill residual bacteria. Individual cell lines are isolated after two to three months (with subcultures every four to six weeks) and are further cultivated on selective medium for tissue amplification (30° C., 16 hr photoperiod). Transformed tissues are subsequently further cultivated on non-selective medium during 2 to 3 months to give rise to somatic embryos. Healthy looking embryos of at least 4 mm length are transferred to tubes with SH medium in fine vermiculite, supplemented with 0.1 mg/l indole acetic acid, 6 furfurylaminopurine and gibberellic acid. The embryos are cultivated at 30° C. with a photoperiod of 16 hrs, and plantlets at the 2 to 3 leaf stage are transferred to pots with vermiculite and nutrients. The plants are hardened and subsequently moved to the greenhouse for further cultivation.

### Sugarbeet Transformation

[0628] Seeds of sugarbeet (Beta vulgaris L.) are sterilized in 70% ethanol for one minute followed by 20 min. shaking in 20% Hypochlorite bleach e.g. Clorox® regular bleach (commercially available from Clorox, 1221 Broadway, Oakland, Calif. 94612, USA). Seeds are rinsed with sterile water and air dried followed by plating onto germinating medium (Murashige and Skoog (MS) based medium (Murashige, T., and Skoog, 1962. Physiol. Plant, vol. 15, 473-497) including B5 vitamins (Gamborg et al.; Exp. Cell Res., vol. 50, 151-8.) supplemented with 10 g/l sucrose and 0.8% agar). Hypocotyl tissue is used essentially for the initiation of shoot cultures according to Hussey and Hepher (Hussey, G., and Hepher, A., 1978. Annals of Botany, 42, 477-9) and are maintained on MS based medium supplemented with 30 g/l sucrose plus 0.25 mg/l benzylamino purine and 0.75% agar, pH 5.8 at 23-25° C. with a 16-hour photoperiod. Agrobacterium tumefaciens strain carrying a binary plasmid harbouring a selectable marker gene, for example nptII, is used in transformation experiments. One day before transformation, a liquid LB culture including antibiotics is grown on a shaker (28° C., 150 rpm) until an optical density (O.D.) at 600 nm of ˜1 is reached. Overnight-grown bacterial cultures are centrifuged and resuspended in inoculation medium (O.D. ˜1) including Acetosyringone, pH 5.5. Shoot base tissue is cut into slices (1.0 cm×1.0 cm×2.0 mm approximately). Tissue is immersed for 30 s in liquid bacterial inoculation medium. Excess liquid is removed by filter paper blotting. Co-cultivation occurred for 24-72 hours on MS based medium incl. 30 g/l sucrose followed by a non-selective period including MS based medium, 30 g/l sucrose with 1 mg/l BAP to induce shoot development and cefotaxim for eliminating the Agrobacterium. After 3-10 days explants are transferred to similar selective medium harbouring for example kanamycin or G418 (50-100 mg/l genotype dependent). Tissues are transferred to fresh medium every 2-3 weeks to maintain selection pressure. The very rapid initiation of shoots (after 3-4 days) indicates regeneration of existing meristems rather than organogenesis of newly developed transgenic meristems. Small shoots are transferred after several rounds of subculture to root induction medium containing 5 mg/l NAA and kanamycin or G418. Additional steps are taken to reduce the potential of generating transformed plants that are chimeric (partially transgenic). Tissue samples from regenerated shoots are used for DNA analysis. Other transformation methods for sugarbeet are known in the art, for example those by Linsey & Gallois (Linsey, K., and Gallois, P., 1990. Journal of Experimental Botany; vol. 41, No. 226; 529-36) or the methods published in the international application published as WO9623891A.

### Sugarcane Transformation

[0629] Spindles are isolated from 6-month-old field grown sugarcane plants (see Arencibia et al., 1998. Transgenic Research, vol. 7, 213-22; Enriquez-Obregon et al., 1998. Planta, vol. 206, 20-27). Material is sterilized by immersion in a 20% Hypochlorite bleach e.g. Clorox® regular bleach (commercially available from Clorox, 1221 Broadway, Oakland, Calif. 94612, USA) for 20 minutes. Transverse sections around 0.5 cm are placed on the medium in the top-up direction. Plant material is cultivated for 4 weeks on MS (Murashige, T., and Skoog, 1962. Physiol. Plant, vol. 15, 473-497) based medium incl. B5 vitamins (Gamborg, O., et al., 1968. Exp. Cell Res., vol. 50, 151-8) supplemented with 20 g/l sucrose, 500 mg/l casein hydrolysate, 0.8% agar and 5 mg/l 2,4-D at 23° C. in the dark. Cultures are transferred after 4 weeks onto identical fresh medium. Agrobacterium tumefaciens strain carrying a binary plasmid harbouring a selectable marker gene, for example hpt, is used in transformation experiments. One day before transformation, a liquid LB culture including antibiotics is grown on a shaker (28° C., 150 rpm) until an optical density (O.D.) at 600 nm of ˜0.6 is reached. Overnight-grown bacterial cultures are centrifuged and resuspended in MS based inoculation medium (O.D. ˜0.4) including acetosyringone, pH 5.5. Sugarcane embryogenic callus pieces (2-4 mm) are isolated based on morphological characteristics as compact structure and yellow colour and dried for 20 min. in the flow hood followed by immersion in a liquid bacterial inoculation medium for 10-20 minutes. Excess liquid is removed by filter paper blotting. Co-cultivation occurred for 3-5 days in the dark on filter paper which is placed on top of MS based medium incl. B5 vitamins containing 1 mg/l 2,4-D. After co-cultivation calli are washed with sterile water followed by a non-selective cultivation period on similar medium containing 500 mg/l cefotaxime for eliminating remaining Agrobacterium cells. After 3-10 days explants are transferred to MS based selective medium incl. B5 vitamins containing 1 mg/l 2,4-D for another 3 weeks harbouring 25 mg/l of hygromycin (genotype dependent). All treatments are made at 23° C. under dark conditions. Resistant calli are further cultivated on medium lacking 2,4-D including 1 mg/l BA and 25 mg/l hygromycin under 16 h light photoperiod resulting in the development of shoot structures. Shoots are isolated and cultivated on selective rooting medium (MS based including, 20 g/l sucrose, 20 mg/l hygromycin and 500 mg/l cefotaxime). Tissue samples from regenerated shoots are used for DNA analysis. Other transformation methods for sugarcane are known in the art, for example from the in-ternational application published as WO2010/151634A and the granted European patent EP1831378.

### Example 10

### Phenotypic Evaluation Procedure

### 10.1 Evaluation Setup

[0630] Approximately 35 independent TO rice transformants were generated. The primary transformants were transferred from a tissue culture chamber to a greenhouse for growing and harvest of T1 seed. Six events, of which the T1 progeny segregated 3:1 for presence/absence of the transgene, were retained. For each of these events, approximately 10 T1 seedlings containing the transgene (hetero- and homo-zygotes) and approximately 10 T1 seedlings lacking the transgene (nullizygotes) were selected by monitoring visual marker expression. The transgenic plants and the corresponding nullizygotes were grown side-by-side at random positions. Greenhouse conditions were of shorts days (12 hours light), 28° C. in the light and 22° C. in the dark, and a relative humidity of 70%. Plants grown under non-stress conditions were watered at regular intervals to ensure that water and nutrients were not limiting and to satisfy plant needs to complete growth and development.

[0631] From the stage of sowing until the stage of maturity the plants were passed several times through a digital imaging cabinet. At each time point digital images (2048×1536 pixels, 16 million colours) were taken of each plant from at least 6 different angles.

### Drought Screen

[0632] Plants from T2 seeds are grown in potting soil under normal conditions until they approached the heading stage. They are then transferred to a “dry” section where irrigation is withheld. Humidity probes are inserted in randomly chosen pots to monitor the soil water content (SWC). When SWC goes below certain thresholds, the plants are automatically re-watered continuously until a normal level is reached again. The plants are then re-transferred again to normal conditions. The rest of the cultivation (plant maturation, seed harvest) is the same as for plants not grown under abiotic stress conditions. Growth and yield parameters are recorded as detailed for growth under normal conditions.

### Nitrogen Use Efficiency Screen

[0633] Rice plants from T2 seeds are grown in potting soil under normal conditions except for the nutrient solution. The pots are watered from transplantation to maturation with a specific nutrient solution containing reduced N nitrogen (N) content, usually between 7 to 8 times less. The rest of the cultivation (plant maturation, seed harvest) is the same as for plants not grown under abiotic stress. Growth and yield parameters are recorded as detailed for growth under normal conditions.

### Salt Stress Screen

[0634] Plants are grown on a substrate made of coco fibers and argex (3 to 1 ratio). A normal nutrient solution is used during the first two weeks after transplanting the plantlets in the greenhouse. After the first two weeks, 25 mM of salt (NaCl) is added to the nutrient solution, until the plants are harvested. Seed-related parameters are then measured.

### 10.2 Statistical Analysis: F Test

[0635] A two factor ANOVA (analysis of variants) was used as a statistical model for the overall evaluation of plant phenotypic characteristics. An F test was carried out on all the parameters measured of all the plants of all the events transformed with the gene of the present invention. The F test was carried out to check for an effect of the gene over all the transformation events and to verify for an overall effect of the gene, also known as a global gene effect. The threshold for significance for a true global gene effect was set at a 5% probability level for the F test. A significant F test value points to a gene effect, meaning that it is not only the mere presence or position of the gene that is causing the differences in phenotype.

### 10.3 Parameters Measured

### Biomass-Related Parameter Measurement

[0636] From the stage of sowing until the stage of maturity the plants were passed several times through a digital imaging cabinet. At each time point digital images (2048×1536 pixels, 16 million colours) were taken of each plant from at least 6 different angles. The plant aboveground area (or leafy biomass) was determined by counting the total number of pixels on the digital images from aboveground plant parts discriminated from the background. This value was averaged for the pictures taken on the same time point from the different angles and was converted to a physical surface value expressed in square mm by calibration. Experiments show that the aboveground plant area measured this way correlates with the biomass of plant parts above ground. The above ground area is the area measured at the time point at which the plant had reached its maximal leafy biomass. The early vigour is the plant (seedling) aboveground area three weeks post-germination. Increase in root biomass is expressed as an increase in total root biomass (measured as maximum biomass of roots observed during the lifespan of a plant); or as an increase in the root/shoot index (measured as the ratio between root mass and shoot mass in the period of active growth of root and shoot).

[0637] Early vigour was determined by counting the total number of pixels from aboveground plant parts discriminated from the background. This value was averaged for the pictures taken on the same time point from different angles and was converted to a physical surface value expressed in square mm by calibration. The results described below are for plants three weeks post-germination.

### Seed-Related Parameter Measurements

[0638] The mature primary panicles were harvested, counted, bagged, barcode-labelled and then dried for three days in an oven at 37° C. The panicles were then threshed and all the seeds were collected and counted. The filled husks were separated from the empty ones using an air-blowing device. The empty husks were discarded and the remaining fraction was counted again. The filled husks were weighed on an analytical balance. The number of filled seeds was determined by counting the number of filled husks that remained after the separation step. The total seed yield was measured by weighing all filled husks harvested from a plant. Total seed number per plant was measured by counting the number of husks harvested from a plant. Thousand Kernel Weight (TKW) is extrapolated from the number of filled seeds counted and their total weight. The Harvest Index (HI) in the present invention is defined as the ratio between the total seed yield and the above ground area (mm²), multiplied by a factor 10⁶. The total number of flowers per panicle as defined in the present invention is the ratio between the total number of seeds and the number of mature primary panicles. The seed fill rate as defined in the present invention is the proportion (expressed as a %) of the number of filled seeds over the total number of seeds (or florets).

### Examples 11

### Results of the Phenotypic Evaluation of the Transgenic Plants

[0639] Evaluation of transgenic T1 rice plants expressing the nucleic acid encoding the OsRSZ33 RRM protein of SEQ ID NO: 2 under control of the rice GOS2 promoter and grown under normal conditions, revealed that these plants had an improved early vigour and increased yield. In particular the plants showed increased biomass and had a higher seed yield. Details are presented in Table E. AreaMax is a parameter reflecting the above-ground biomass whereas GravityYMax is an indication of plant height, EmerVigor is early vigour, root biomass is reflected by the RootMax, RootSHInd and the RootThickMax parameters, seed yield is reflected by totalwgseeds, nrtotalseed, harvestindex, nrfilledseed. The firstpan parameter represents the number of panicles in the first flush.

TABLE E
Data summary for transgenic rice plants; for each parameter,
the percentage overall increase is shown; for each parameter the
p-value is <0.05 and the increase is above 5%.

| Parameter | Overall increase |
|---|---|
| AreaMax | 8.5 |
| EmerVigor | 20.2 |
| RootMax | 11.3 |
| RootShlnd | 5.8 |
| totalwgseeds | 27.9 |
| nrtotalseed | 19.7 |
| harvestindex | 18.8 |
| firstpan | 19.7 |
| nrfilledseed | 26.2 |
| GravityYMax | 6.9 |
| RootThickMax | 7.9 |

### Example 12

### Identification of Sequences Related to SEQ ID NO: 250 and SEQ ID NO: 251

[0640] Sequences (full length cDNA, ESTs or genomic) related to SEQ ID NO: 250 and SEQ ID NO: 251 were identified amongst those maintained in the Entrez Nucleotides database at the National Center for Biotechnology Information (NCBI) using database sequence search tools, such as the Basic Local Alignment Tool (BLAST) (Altschul et al. (1990) J. Mol. Biol. 215:403-410; and Altschul et al. (1997) Nucleic Acids Res. 25:3389-3402). The program is used to find regions of local similarity between sequences by comparing nucleic acid or polypeptide sequences to sequence databases and by calculating the statistical significance of matches. For example, the polypeptide encoded by the nucleic acid of SEQ ID NO: 250 was used for the TBLASTN algorithm, with default settings and the filter to ignore low complexity sequences set off. The output of the analysis was viewed by pairwise comparison, and ranked according to the probability score (E-value), where the score reflect the probability that a particular alignment occurs by chance (the lower the E-value, the more significant the hit). In addition to E-values, comparisons were also scored by percentage identity. Percentage identity refers to the number of identical nucleotides (or amino acids) between the two compared nucleic acid (or polypeptide) sequences over a particular length. In some instances, the default parameters may be adjusted to modify the stringency of the search. For example the E-value may be increased to show less stringent matches. This way, short nearly exact matches may be identified.

[0641] Table F provides SEQ ID NO: 250 and SEQ ID NO: 251 and a list of nucleic acid sequences related to SEQ ID NO: 250 and SEQ ID NO: 251.

TABLE F

| | Nucleic | Protein |
|---|---|---|
| | acid SEQ | SEQ ID |
| Name of gene from a plant source | ID NO: | NO: |
| >O. sativa_LOC_Os03g51459.1 | 250 | 251 |
| >A. acetabulum_TA54_35845 | 252 | 253 |
| >A. capillus-veneris_BP912995 | 254 | 255 |
| >A. cepa_CF450030 | 256 | 257 |
| >A. hypogaea_EE126007 | 258 | 259 |
| >A. lyrata_490696 | 260 | 261 |
| >A. lyrata_899434 | 262 | 263 |
| >A. lyrata_925291 | 264 | 265 |
| >A. ostenfeldii_s_ao001019065r | 266 | 267 |
| >A. sativa_CN817242 | 268 | 269 |
| >A. stolonifera_DV867767 | 270 | 271 |
| >A. stolonifera_TA231_63632 | 272 | 273 |
| >A. thaliana_AT2G21640.1 | 274 | 275 |
| >A. thaliana_AT3G05570.1 | 276 | 277 |
| >A. thaliana_AT4G39235 | 278 | 279 |
| >A. trichopoda_CK760605 | 280 | 281 |
| >Aquilegia_sp_DR926960 | 282 | 283 |
| >B. distachyon_DV476865 | 284 | 285 |
| >B. napus_BN06MC17528_45500759 | 286 | 287 |
| B. napus_EV018535 | 288 | 289 |
| B. napus_TC83237 | 290 | 291 |
| B. napus_TC89650 | 292 | 293 |
| B. napus_TC90230 | 294 | 295 |
| B. napus_TC91334 | 296 | 297 |
| B. napus_TC97660 | 298 | 299 |
| B. pendula_AF124839 | 300 | 301 |
| B. pendula_X77601 | 302 | 303 |
| B. rapa_L37464 | 304 | 305 |
| C. annuum_GD122922 | 306 | 307 |
| C. annuum_TC18479 | 308 | 309 |
| C. annuum_TC26276 | 310 | 311 |
| C. canephora_DV681808 | 312 | 313 |
| C. canephora_DV695337 | 314 | 315 |
| C. cohnii_c_crco7281_t | 316 | 317 |
| C. intybus_TA3382_13427 | 318 | 319 |
| C. japonica_BP176677 | 320 | 321 |
| C. lanatus_DV737304 | 322 | 323 |
| C. maculosa_TA314_215693 | 324 | 325 |
| C. melo_DV634184 | 326 | 327 |
| C. obtusa_TA672_13415 | 328 | 329 |
| C. papaya_CP00062G01530 | 330 | 331 |
| C. persicum_AJ886827 | 332 | 333 |
| C. persicum_AJ887419 | 334 | 335 |
| C. richardii_BE641723 | 336 | 337 |
| C. rumphii_CB089289 | 338 | 339 |
| C. rumphii_CB091964 | 340 | 341 |
| C. rumphii_TA1592_58031 | 342 | 343 |
| C. sativus_TA1216_3659 | 344 | 345 |
| C. sinensis_CB290321 | 346 | 347 |
| C. sinensis_EY668068 | 348 | 349 |
| C. sinensis_EY672891 | 350 | 351 |
| C. sinensis_EY727333 | 352 | 353 |
| C. solstitialis_EH773123 | 354 | 355 |
| C. solstitialis_EH786461 | 356 | 357 |
| C. solstitialis_TA4017_347529 | 358 | 359 |
| C. tetragonoloba_EG985118 | 360 | 361 |
| C. tinctorius_EL398763 | 362 | 363 |
| C. tinctorius_EL406768 | 364 | 365 |
| C. tinctorius_TA2172_4222 | 366 | 367 |
| D. sophia_BU238588 | 368 | 369 |
| E. esula_DV122995 | 370 | 371 |
| E. esula_DV150176 | 372 | 373 |
| E. gracilis_s_eg003003033r | 374 | 375 |
| E. gracilis_s_eg003043031r | 376 | 377 |
| E. grandis_CD668035 | 378 | 379 |
| E. lagascae_s_el01539_t | 380 | 381 |
| E. tereticornis_CD668461 | 382 | 383 |
| E. tereticornis_CD668945 | 384 | 385 |
| E. tirucalli_BP955531 | 386 | 387 |
| F. arundinacea_DT704699 | 388 | 389 |
| F. vesca_EX687128 | 390 | 391 |
| G. hirsutum_DR458244 | 392 | 393 |
| G. hirsutum_TC155046 | 394 | 395 |
| G. max_Glyma01g38260.1 | 396 | 397 |
| G. max_Glyma04g16400.1 | 398 | 399 |
| G. max_Glyma06g46580.1 | 400 | 401 |
| G. max_Glyma11g07320.1 | 402 | 403 |
| H. annuus_AJ318325 | 404 | 405 |
| H. annuus_DY919530 | 406 | 407 |
| H. annuus_DY923448 | 408 | 409 |
| H. annuus_TC50420 | 410 | 411 |
| H. argophyllus_EE609770 | 412 | 413 |
| H. argophyllus_EE616927 | 414 | 415 |
| H. centranthoides_CB088324 | 416 | 417 |
| H. exilis_EE660703 | 418 | 419 |
| H. tuberosus_EL467266 | 420 | 421 |
| H. vulgare_AJ473991 | 422 | 423 |
| H. vulgare_HV04MC01061_62590923 | 424 | 425 |
| H. vulgare_TC157023 | 426 | 427 |
| H. vulgare_TC173149 | 428 | 429 |
| H. vulgare_TC181924 | 430 | 431 |
| Helicosporidium_CX129083 | 432 | 433 |
| I. nil_TC8501 | 434 | 435 |
| L. chinensis_CN466203 | 436 | 437 |
| L. japonicus_BP063220 | 438 | 439 |
| L. japonicus_TC39016 | 440 | 441 |
| L. japonicus_TC42407 | 442 | 443 |
| L. saligna_DW062513 | 444 | 445 |
| L. saligna_DW070628 | 446 | 447 |
| L. saligna_TA4820_75948 | 448 | 449 |
| L. serriola_DW108864 | 450 | 451 |
| L. serriola_TC4935 | 452 | 453 |
| L. temulentum_TA732_34176 | 454 | 455 |
| L. usitatissimum_61837850.f_e04_2 | 456 | 457 |
| L. usitatissimum_c61576581 | 458 | 459 |
| L. usitatissimum_LU04MC07265_61837850 | 460 | 461 |
| L. usitatissimum_LU04MC10588_62332478 | 462 | 463 |
| L. virosa_DW169559 | 464 | 465 |
| L. virosa_DW172306 | 466 | 467 |
| M. acuminata_ES437129 | 468 | 469 |
| M. acuminata_TA641_4641 | 470 | 471 |
| M. crystallinum_BE034710 | 472 | 473 |
| M. crystallinum_BF479478 | 474 | 475 |
| M. domestica_TC40305 | 476 | 477 |
| M. esculenta_DV449414 | 478 | 479 |
| M. piperita_AW255467 | 480 | 481 |
| M. polymorpha_BJ867244 | 482 | 483 |
| M. sieboldii_CN915468 | 484 | 485 |
| M. truncatula_AC135566_19.5 | 486 | 487 |
| N. advena_CD474178 | 488 | 489 |
| N. benthamiana_TC16460 | 490 | 491 |
| N. nucifera_EH613403 | 492 | 493 |
| N. sylvestris_BP745520 | 494 | 495 |
| N. tabacum_TC51197 | 496 | 497 |
| N. tabacum_TC59871 | 498 | 499 |
| N. tabacum_TC76332 | 500 | 501 |
| Nicotiana_langsdorffii_x_sanderae_TA262_164110 | 502 | 503 |
| O. glaberrima_Og010279.01 | 504 | 505 |
| O. sativa_LOC_Os03g05700.1 | 506 | 507 |
| O. sativa_LOC_Os03g51470.1 | 508 | 509 |
| S. cereale_BQ160374 | 510 | 511 |
| O. sativa_LOC_Os08g10400.1 | 512 | 513 |
| O. sativa_LOC_Os10g40824.1 | 514 | 515 |
| P. americana_CV002279 | 516 | 517 |
| P. armeniaca_TA3954_36596 | 518 | 519 |
| P. axillaris_TA164_33119 | 520 | 521 |
| P. canadensis_CX183847 | 522 | 523 |
| P. cerasus_EE488481 | 524 | 525 |
| P. coccineus_CA911820 | 526 | 527 |
| P. dulcis_BU573498 | 528 | 529 |
| P. dulcis_BU574572 | 530 | 531 |
| P. equestris_CB033634 | 532 | 533 |
| P. euphratica_AJ773453 | 534 | 535 |
| P. ginseng_DV556099 | 536 | 537 |
| P. ginseng_DV556139 | 538 | 539 |
| P. glauca_CO479030 | 540 | 541 |
| P. glaucum_EB410943 | 542 | 543 |
| P. hybrida_TC1584 | 544 | 545 |
| P. menziesii_ES421929 | 546 | 547 |
| P. patens_TC54724 | 548 | 549 |
| P. pinaster_TA3303_71647 | 550 | 551 |
| P. sitchensis_TA13290_3332 | 552 | 553 |
| P. taeda_TA15984_3352 | 554 | 555 |
| P. tenuiflora_CN487508 | 556 | 557 |
| P. tremula_TA10333_113636 | 558 | 559 |
| P. tremula_TA7771_113636 | 560 | 561 |
| P. tremula_TA7772_113636 | 562 | 563 |
| P. trichocarpa_585933 | 564 | 565 |
| P. trichocarpa_643359 | 566 | 567 |
| P. trichocarpa_831254 | 568 | 569 |
| P. tricornutum_34756 | 570 | 571 |
| P. tricornutum_35319 | 572 | 573 |
| P. tricornutum_45377 | 574 | 575 |
| P. trifoliata_CX640083 | 576 | 577 |
| P. virgatum_FL844915 | 578 | 579 |
| P. virgatum_GD012331 | 580 | 581 |
| P. virgatum_TC15762 | 582 | 583 |
| P. virgatum_TC18672 | 584 | 585 |
| P. virgatum_TC19371 | 586 | 587 |
| P. virgatum_TC21333 | 588 | 589 |
| P. virgatum_TC35301 | 590 | 591 |
| P. virgatum_TC45394 | 592 | 593 |
| P. virgatum_TC49042 | 594 | 595 |
| P. vulgaris_TC16757 | 596 | 597 |
| P. wickerhamii_TA800_3111 | 598 | 599 |
| P. zeylanica_CB817807 | 600 | 601 |
| R. chinensis_BI978170 | 602 | 603 |
| R. chinensis_BI978786 | 604 | 605 |
| R. chinensis_TA261_74649 | 606 | 607 |
| R. hybrid_BQ104489 | 608 | 609 |
| S. alterniflora_EH277022 | 610 | 611 |
| S. alterniflora_EH277475 | 612 | 613 |
| S. bicolor_Sb01g009650.1 | 614 | 615 |
| S. bicolor_Sb01g009660.1 | 616 | 617 |
| S. bicolor_Sb01g029160.1 | 618 | 619 |
| S. bicolor_Sb01g035820.1 | 620 | 621 |
| S. henryi_DT591892 | 622 | 623 |
| S. hybrid_CF574777 | 624 | 625 |
| S. lycopersicum_DB694810 | 626 | 627 |
| S. lycopersicum_TC200119 | 628 | 629 |
| S. officinarum_CA100293 | 630 | 631 |
| S. officinarum_CA142694 | 632 | 633 |
| S. officinarum_CA202822 | 634 | 635 |
| S. officinarum_TC78965 | 636 | 637 |
| S. officinarum_TC81273 | 638 | 639 |
| S. salsa_AW982145 | 640 | 641 |
| S. tuberosum_TC181351 | 642 | 643 |
| T. aestivum_CA603660 | 644 | 645 |
| T. aestivum_CK151611 | 646 | 647 |
| T. aestivum_TA06MC03363_54495378 | 648 | 649 |
| T. aestivum_TA06MC09026_55236832 | 650 | 651 |
| T. aestivum_TC299614 | 652 | 653 |
| T. aestivum_TC300853 | 654 | 655 |
| T. aestivum_TC305290 | 656 | 657 |
| T. aestivum_TC307541 | 658 | 659 |
| T. aestivum_TC307720 | 660 | 661 |
| T. aestivum_TC311647 | 662 | 663 |
| T. aestivum_TC313329 | 664 | 665 |
| T. aestivum_TC335317 | 666 | 667 |
| T. androssowii_TA2143_189785 | 668 | 669 |
| T. erecta_SIN_01b-CS_Scarletade-9-C16.b1 | 670 | 671 |
| T. kok-saghyz_DR401105 | 672 | 673 |
| T. kok-saghyz_DR401469 | 674 | 675 |
| T. monococcum_BE492863 | 676 | 677 |
| T. monococcum_BQ802764 | 678 | 679 |
| T. officinale_DY838884 | 680 | 681 |
| T. officinale_DY839222 | 682 | 683 |
| T. officinale_TA1556_50225 | 684 | 685 |
| T. pseudonana_25031 | 686 | 687 |
| T. ruralis_CN200805 | 688 | 689 |
| T. versicolor_EY020157 | 690 | 691 |
| Triphysaria_sp_EY135750 | 692 | 693 |
| Triphysaria_sp_EY140347 | 694 | 695 |
| Triphysaria_sp_TC10995 | 696 | 697 |
| V. arizonica_x_rupestris_DN943112 | 698 | 699 |
| V. corymbosum_CV190443 | 700 | 701 |
| V. vinifera_GSVIVT00036379001 | 702 | 703 |
| Y. filamentosa_DT598701 | 704 | 705 |
| Z. aethiopica_TA1222_69721 | 706 | 707 |
| Z. elegans_AU288933 | 708 | 709 |
| Z. mays_AI649427 | 710 | 711 |
| Z. mays_FL334597 | 712 | 713 |
| Z. mays_TC477409 | 714 | 715 |
| Z. mays_TC479072 | 716 | 717 |
| Z. mays_TC486459 | 718 | 719 |
| Z. mays_TC487740 | 720 | 721 |
| Z. mays_TC490320 | 722 | 723 |
| Z. mays_TC502630 | 724 | 725 |
| Z. mays_TC506050 | 726 | 727 |
| Z. mays_TC514541 | 728 | 729 |
| Z. mays_TC522093 | 730 | 731 |
| Z. mays_TC522166 | 732 | 733 |
| Z. mays_TC535140 | 734 | 735 |
| Z. mays_ZM07MSbpsHQ_57582449.r01 | 736 | 737 |
| Z. officinale_TA5715_94328 | 738 | 739 |

[0642] Sequences have been tentatively assembled and publicly disclosed by research institutions, such as The Institute for Genomic Research (TIGR; beginning with TA). For instance, the Eukaryotic Gene Orthologs (EGO) database may be used to identify such related sequences, either by keyword search or by using the BLAST algorithm with the nucleic acid sequence or polypeptide sequence of interest. Special nucleic acid sequence databases have been created for particular organisms, e.g. for certain prokaryotic organisms, such as by the Joint Genome Institute. Furthermore, access to proprietary databases, has allowed the identification of novel nucleic acid and polypeptide sequences.

### Example 13

### Alignment of GRP Polypeptide Sequences

[0643] Alignment of a number of polypeptide sequences was performed using the ClustalW (1.8) algorithm of progressive alignment (Thompson et al. (1997) Nucleic Acids Res 25:4876-4882; Chenna et al. (2003). Nucleic Acids Res 31:3497-3500) with standard setting (slow alignment, similarity matrix: Gonnet, gap opening penalty 10, gap extension penalty: 0.2). Minor manual editing was done to further optimise the alignment. These polypeptides are aligned in FIG. 7.

### Example 14

### Calculation of Global Percentage Identity Between Polypeptide Sequences

[0644] Global percentages of similarity and identity between full length polypeptide sequences useful in performing the methods of the invention were determined using one of the methods available in the art, the MatGAT (Matrix Global Alignment Tool) software (BMC Bioinformatics. 2003 4:29. MatGAT: an application that generates similarity/identity matrices using protein or DNA sequences. Campanella J J, Bitincka L, Smalley J; software hosted by Ledion Bitincka). MatGAT software generates similarity/identity matrices for DNA or protein sequences without needing pre-alignment of the data. The program performs a series of pair-wise alignments using the Myers and Miller global alignment algorithm (with a gap opening penalty of 12, and a gap extension penalty of 2), calculates similarity and identity using for example Blosum 62 (for polypeptides), and then places the results in a distance matrix.

[0645] Results of the software analysis are shown in FIG. 8 for the global similarity and identity over the full length of a representative list of polypeptide sequences. Sequence similarity is shown in the bottom half of the dividing line and sequence identity is shown in the top half of the diagonal dividing line. Parameters used in the comparison were: Scoring matrix: Blosum62, First Gap: 12, Extending Gap: 2. The sequence identity (in %) between the polypeptide sequences useful in performing the methods of the invention is generally higher than 20%) compared to SEQ ID NO: 251.

### Example 15

### Topology Prediction of a Polypeptide Sequences According to the Invention

[0646] TargetP 1.1 predicts the subcellular location of eukaryotic proteins. The location assignment is based on the predicted presence of any of the N-terminal pre-sequences: chloroplast transit peptide (cTP), mitochondrial targeting peptide (mTP) or secretory pathway signal peptide (SP). Scores on which the final prediction is based are not really probabilities, and they do not necessarily add to one. However, the location with the highest score is the most likely according to TargetP, and the relationship between the scores (the reliability class) may be an indication of how certain the prediction is. The reliability class (RC) ranges from 1 to 5, where 1 indicates the strongest prediction. TargetP is maintained at the server of the Technical University of Denmark.

[0647] For the sequences predicted to contain an N-terminal presequence a potential cleavage site can also be predicted.

[0648] A number of parameters can be selected, such as organism group (non-plant or plant), cutoff sets (none, predefined set of cutoffs, or user-specified set of cutoffs), and the calculation of prediction of cleavage sites (yes or no). In the present case, the “plant” organism group has been selected, no cutoffs defined, and the predicted length of the transit peptide requested. The results of TargetP 1.1 analysis of the polypeptide sequence as represented by SEQ ID NO: 251 are presented Table G.

TABLE G
TargetP 1.1 analysis of the polypeptide
sequence as represented by SEQ ID NO: 2.

| Name | Len | cTP | mTP | SP | other | Loc | RC | TPlen |
|---|---|---|---|---|---|---|---|---|
| Sequence | 95 | 0.549 | 0.095 | 0.116 | 0.519 | C | 5 | 23 |
| cutoff | | 0.000 | 0.000 | 0.000 | 0.000 | | | |

Abbreviations: Len, Length; cTP, Chloroplastic transit peptide; mTP, Mitochondrial transit peptide, SP, Secretory pathway signal peptide, other, Other subcellular targeting, Loc, Predicted Location; RC, Reliability class; TPlen, Predicted transit peptide length.

[0649] Many other algorithms can be used to perform such analyses, including:
[0650] ChloroP 1.1 hosted on the server of the Technical University of Denmark;
[0651] Protein Prowler Subcellular Localisation Predictor version 1.2 hosted on the server of the Institute for Molecular Bioscience, University of Queensland, Brisbane, Australia;
[0652] PENCE Proteome Analyst PA-GOSUB 2.5 hosted on the server of the University of Alberta, Edmonton, Alberta, Canada;
[0653] TMHMM, hosted on the server of the Technical University of Denmark
[0654] PSORT (URL: psort.org)
[0655] PLOC (Park and Kanehisa, Bioinformatics, 19, 1656-1663, 2003).

[0656] Results of the PSORT algorithm given in Table H indicate for instance the following:

TABLE H

| | |
|---|---|
| chloroplast thylakoid space | Certainty = 0.950 (Affirmative) <succ> |
| chloroplast stroma | Certainty = 0.727 (Affirmative) <succ> |
| Chloroplast thylakoid membrane | Certainty = 0.504 (Affirmative) <succ> |

### Example 16

### Cloning of a Nucleic Acid Sequence Encoding a GRP According to the Invention

[0657] The nucleic acid sequence was amplified by PCR using as template a custom-made Oryza sativa seedlings cDNA library. PCR was performed using Hifi Taq DNA polymerase in standard conditions, using 200 ng of template in a 50 μl PCR mix. The primers used were prm14300 (SEQ ID NO: 740; sense): 5′-ggggacaagtttgtacaaaaaagcaggcttaaacaatggaat ccattaagacacaa-3′; and prm14301 (SEQ ID NO: 741; reverse, complementary): 5′-ggggaccactttgtacaagaaagctgggtcagaaggcaaacaagctg-3′, which include the AttB sites for Gateway recombination. The amplified PCR fragment was purified also using standard methods. The first step of the Gateway procedure, the BP reaction, was then performed, during which the PCR fragment recombined in vivo with the pDONR201 plasmid to produce, according to the Gateway terminology, an “entry clone”, pGRP. Plasmid pDONR201 was purchased from Invitrogen, as part of the Gateway® technology. The entry clone comprising SEQ ID NO: 250 was then used in an LR reaction with a destination vector used for Oryza sativa transformation. This vector contained as functional elements within the T-DNA borders: a plant selectable marker; a screenable marker expression cassette; and a Gateway cassette intended for LR in vivo recombination with the nucleic acid sequence of interest already cloned in the entry clone. A rice GOS2 promoter (SEQ ID NO: 744) for constitutive specific expression was located upstream of this Gateway cassette. After the LR recombination step, the resulting expression vector pGOS2::GRP (FIG. 9) was transformed into Agrobacterium strain LBA4044 according to methods well known in the art.

### Example 17

### Plant Transformation

### Rice Transformation

[0658] The Agrobacterium containing the expression vector was used to transform Oryza sativa plants. Mature dry seeds of the rice japonica cultivar Nipponbare were dehusked. Sterilization was carried out by incubating for one minute in 70% ethanol, followed by 30 minutes in 0.2% HgCl₂, followed by a 6 times 15 minutes wash with sterile distilled water. The sterile seeds were then germinated on a medium containing 2,4-D (callus induction medium). After incubation in the dark for four weeks, embryogenic, scutellum-derived calli were excised and propagated on the same medium. After two weeks, the calli were multiplied or propagated by subculture on the same medium for another 2 weeks. Embryogenic callus pieces were sub-cultured on fresh medium 3 days before co-cultivation (to boost cell division activity).

[0659] Agrobacterium strain LBA4404 containing the expression vector was used for co-cultivation. Agrobacterium was inoculated on AB medium with the appropriate antibiotics and cultured for 3 days at 28° C. The bacteria were then collected and suspended in liquid co-cultivation medium to a density (OD₆₀₀) of about 1. The suspension was then transferred to a Petri dish and the calli immersed in the suspension for 15 minutes. The callus tissues were then blotted dry on a filter paper and transferred to solidified, co-cultivation medium and incubated for 3 days in the dark at 25° C. Co-cultivated calli were grown on 2,4-D-containing medium for 4 weeks in the dark at 28° C. in the presence of a selection agent. During this period, rapidly growing resistant callus islands developed. After transfer of this material to a regeneration medium and incubation in the light, the embryogenic potential was released and shoots developed in the next four to five weeks. Shoots were excised from the calli and incubated for 2 to 3 weeks on an auxin-containing medium from which they were transferred to soil. Hardened shoots were grown under high humidity and short days in a greenhouse.

[0660] Approximately 35 independent TO rice transformants were generated for one construct. The primary transformants were transferred from a tissue culture chamber to a greenhouse. After a quantitative PCR analysis to verify copy number of the T-DNA insert, only single copy transgenic plants that exhibit tolerance to the selection agent were kept for harvest of T1 seed. Seeds were then harvested three to five months after transplanting. The method yielded single locus transformants at a rate of over 50% (Aldemita and Hodges1996, Chan et al. 1993, Hiei et al. 1994).

### Example 18

### Transformation of Other Crops

### Corn Transformation

[0661] Transformation of maize (Zea mays) is performed with a modification of the method described by Ishida et al. (1996) Nature Biotech 14(6): 745-50. Transformation is genotype-dependent in corn and only specific genotypes are amenable to transformation and regeneration. The inbred line A188 (University of Minnesota) or hybrids with A188 as a parent are good sources of donor material for transformation, but other genotypes can be used successfully as well. Ears are harvested from corn plant approximately 11 days after pollination (DAP) when the length of the immature embryo is about 1 to 1.2 mm. Immature embryos are cocultivated with Agrobacterium tumefaciens containing the expression vector, and transgenic plants are recovered through organogenesis. Excised embryos are grown on callus induction medium, then maize regeneration medium, containing the selection agent (for example imidazolinone but various selection markers can be used). The Petri plates are incubated in the light at 25° C. for 2-3 weeks, or until shoots develop. The green shoots are transferred from each embryo to maize rooting medium and incubated at 25° C. for 2-3 weeks, until roots develop. The rooted shoots are transplanted to soil in the greenhouse. T1 seeds are produced from plants that exhibit tolerance to the selection agent and that contain a single copy of the T-DNA insert.

### Wheat Transformation

[0662] Transformation of wheat is performed with the method described by Ishida et al. (1996) Nature Biotech 14(6): 745-50. The cultivar Bobwhite (available from CIMMYT, Mexico) is commonly used in transformation. Immature embryos are co-cultivated with Agrobacterium tumefaciens containing the expression vector, and transgenic plants are recovered through organogenesis. After incubation with Agrobacterium, the embryos are grown in vitro on callus induction medium, then regeneration medium, containing the selection agent (for example imidazolinone but various selection markers can be used). The Petri plates are incubated in the light at 25° C. for 2-3 weeks, or until shoots develop. The green shoots are transferred from each embryo to rooting medium and incubated at 25° C. for 2-3 weeks, until roots develop. The rooted shoots are transplanted to soil in the greenhouse. T1 seeds are produced from plants that exhibit tolerance to the selection agent and that contain a single copy of the T-DNA insert.

### Soybean Transformation

[0663] Soybean is transformed according to a modification of the method described in the Texas A&M U.S. Pat. No. 5,164,310. Several commercial soybean varieties are amenable to transformation by this method. The cultivar Jack (available from the Illinois Seed foundation) is commonly used for transformation. Soybean seeds are sterilised for in vitro sowing. The hypocotyl, the radicle and one cotyledon are excised from seven-day old young seedlings. The epicotyl and the remaining cotyledon are further grown to develop axillary nodes. These axillary nodes are excised and incubated with Agrobacterium tumefaciens containing the expression vector. After the cocultivation treatment, the explants are washed and transferred to selection media. Regenerated shoots are excised and placed on a shoot elongation medium. Shoots no longer than 1 cm are placed on rooting medium until roots develop. The rooted shoots are transplanted to soil in the greenhouse. T1 seeds are produced from plants that exhibit tolerance to the selection agent and that contain a single copy of the T-DNA insert.

### Rapeseed/Canola Transformation

[0664] Cotyledonary petioles and hypocotyls of 5-6 day old young seedling are used as explants for tissue culture and transformed according to Babic et al. (1998, Plant Cell Rep 17: 183-188). The commercial cultivar Westar (Agriculture Canada) is the standard variety used for transformation, but other varieties can also be used. Canola seeds are surface-sterilized for in vitro sowing. The cotyledon petiole explants with the cotyledon attached are excised from the in vitro seedlings, and inoculated with Agrobacterium (containing the expression vector) by dipping the cut end of the petiole explant into the bacterial suspension. The explants are then cultured for 2 days on MSBAP-3 medium containing 3 mg/l BAP, 3% sucrose, 0.7 Phytagar at 23° C., 16 hr light. After two days of co-cultivation with Agrobacterium, the petiole explants are transferred to MSBAP-3 medium containing 3 mg/l BAP, cefotaxime, carbenicillin, or timentin (300 mg/l) for 7 days, and then cultured on MSBAP-3 medium with cefotaxime, carbenicillin, or timentin and selection agent until shoot regeneration. When the shoots are 5-10 mm in length, they are cut and transferred to shoot elongation medium (MSBAP-0.5, containing 0.5 mg/l BAP). Shoots of about 2 cm in length are transferred to the rooting medium (MS0) for root induction. The rooted shoots are transplanted to soil in the greenhouse. T1 seeds are produced from plants that exhibit tolerance to the selection agent and that contain a single copy of the T-DNA insert.

### Alfalfa Transformation

[0665] A regenerating clone of alfalfa (Medicago sativa) is transformed using the method of (McKersie et al., 1999 Plant Physiol 119: 839-847). Regeneration and transformation of alfalfa is genotype dependent and therefore a regenerating plant is required. Methods to obtain regenerating plants have been described. For example, these can be selected from the cultivar Rangelander (Agriculture Canada) or any other commercial alfalfa variety as described by Brown D C W and A Atanassov (1985. Plant Cell Tissue Organ Culture 4: 111-112). Alternatively, the RA3 variety (University of Wisconsin) has been selected for use in tissue culture (Walker et al., 1978 Am J Bot 65:654-659). Petiole explants are cocultivated with an overnight culture of Agrobacterium tumefaciens C58C1 pMP90 (McKersie et al., 1999 Plant Physiol 119: 839-847) or LBA4404 containing the expression vector. The explants are cocultivated for 3 d in the dark on SH induction medium containing 288 mg/L Pro, 53 mg/L thioproline, 4.35 g/L K2SO4, and 100 μm acetosyringinone. The explants are washed in half-strength Murashige-Skoog medium (Murashige and Skoog, 1962) and plated on the same SH induction medium without acetosyringinone but with a suitable selection agent and suitable antibiotic to inhibit Agrobacterium growth. After several weeks, somatic embryos are transferred to BOi2Y development medium containing no growth regulators, no antibiotics, and 50 g/L sucrose. Somatic embryos are subsequently germinated on half-strength Murashige-Skoog medium. Rooted seedlings were transplanted into pots and grown in a greenhouse. T1 seeds are produced from plants that exhibit tolerance to the selection agent and that contain a single copy of the T-DNA insert.

### Cotton Transformation

[0666] Cotton is transformed using Agrobacterium tumefaciens according to the method described in U.S. Pat. No. 5,159,135. Cotton seeds are surface sterilised in 3% sodium hypochlorite solution during 20 minutes and washed in distilled water with 500 μg/ml cefotaxime. The seeds are then transferred to SH-medium with 50 μg/ml benomyl for germination. Hypocotyls of 4 to 6 days old seedlings are removed, cut into 0.5 cm pieces and are placed on 0.8% agar. An Agrobacterium suspension (approx. 108 cells per ml, diluted from an overnight culture transformed with the gene of interest and suitable selection markers) is used for inoculation of the hypocotyl explants. After 3 days at room temperature and lighting, the tissues are transferred to a solid medium (1.6 g/l Gelrite) with Murashige and Skoog salts with B5 vitamins (Gamborg et al., Exp. Cell Res. 50:151-158 (1968)), 0.1 mg/l 2,4-D, 0.1 mg/l 6-furfurylaminopurine and 750 μg/ml MgCL2, and with 50 to 100 μg/ml cefotaxime and 400-500 μg/ml carbenicillin to kill residual bacteria. Individual cell lines are isolated after two to three months (with subcultures every four to six weeks) and are further cultivated on selective medium for tissue amplification (30° C., 16 hr photoperiod). Transformed tissues are subsequently further cultivated on non-selective medium during 2 to 3 months to give rise to somatic embryos. Healthy looking embryos of at least 4 mm length are transferred to tubes with SH medium in fine vermiculite, supplemented with 0.1 mg/l indole acetic acid, 6 furfurylaminopurine and gibberellic acid. The embryos are cultivated at 30° C. with a photoperiod of 16 hrs, and plantlets at the 2 to 3 leaf stage are transferred to pots with vermiculite and nutrients. The plants are hardened and subsequently moved to the greenhouse for further cultivation.

### Sugarbeet Transformation

[0667] Seeds of sugarbeet (Beta vulgaris L.) are sterilized in 70% ethanol for one minute followed by 20 min. shaking in 20% Hypochlorite bleach e.g. Clorox® regular bleach (commercially available from Clorox, 1221 Broadway, Oakland, Calif. 94612, USA). Seeds are rinsed with sterile water and air dried followed by plating onto germinating medium (Murashige and Skoog (MS) based medium (Murashige, T., and Skoog, 1962. Physiol. Plant, vol. 15, 473-497) including B5 vitamins (Gamborg et al.; Exp. Cell Res., vol. 50, 151-8.) supplemented with 10 g/l sucrose and 0.8% agar). Hypocotyl tissue is used essentially for the initiation of shoot cultures according to Hussey and Hepher (Hussey, G., and Hepher, A., 1978. Annals of Botany, 42, 477-9) and are maintained on MS based medium supplemented with 30 g/l sucrose plus 0.25 mg/l benzylamino purine and 0.75% agar, pH 5.8 at 23-25° C. with a 16-hour photoperiod. Agrobacterium tumefaciens strain carrying a binary plasmid harbouring a selectable marker gene, for example nptII, is used in transformation experiments. One day before transformation, a liquid LB culture including antibiotics is grown on a shaker (28° C., 150 rpm) until an optical density (O.D.) at 600 nm of ˜1 is reached. Overnight-grown bacterial cultures are centrifuged and resuspended in inoculation medium (O.D. ˜1) including Acetosyringone, pH 5.5. Shoot base tissue is cut into slices (1.0 cm×1.0 cm×2.0 mm approximately). Tissue is immersed for 30 s in liquid bacterial inoculation medium. Excess liquid is removed by filter paper blotting. Co-cultivation occurred for 24-72 hours on MS based medium incl. 30 g/l sucrose followed by a non-selective period including MS based medium, 30 g/l sucrose with 1 mg/l BAP to induce shoot development and cefotaxim for eliminating the Agrobacterium. After 3-10 days explants are transferred to similar selective medium harbouring for example kanamycin or G418 (50-100 mg/l genotype dependent). Tissues are transferred to fresh medium every 2-3 weeks to maintain selection pressure. The very rapid initiation of shoots (after 3-4 days) indicates regeneration of existing meristems rather than organogenesis of newly developed transgenic meristems. Small shoots are transferred after several rounds of subculture to root induction medium containing 5 mg/l NAA and kanamycin or G418. Additional steps are taken to reduce the potential of generating transformed plants that are chimeric (partially transgenic). Tissue samples from regenerated shoots are used for DNA analysis. Other transformation methods for sugarbeet are known in the art, for example those by Linsey & Gallois (Linsey, K., and Gallois, P., 1990. Journal of Experimental Botany; vol. 41, No. 226; 529-36) or the methods published in the international application published as WO9623891A.

### Sugarcane Transformation

[0668] Spindles are isolated from 6-month-old field grown sugarcane plants (see Arencibia et al., 1998. Transgenic Research, vol. 7, 213-22; Enriquez-Obregon et al., 1998. Planta, vol. 206, 20-27). Material is sterilized by immersion in a 20% Hypochlorite bleach e.g. Clorox® regular bleach (commercially available from Clorox, 1221 Broadway, Oakland, Calif. 94612, USA) for 20 minutes. Transverse sections around 0.5 cm are placed on the medium in the top-up direction. Plant material is cultivated for 4 weeks on MS (Murashige, T., and Skoog, 1962. Physiol. Plant, vol. 15, 473-497) based medium incl. B5 vitamins (Gamborg, O., et al., 1968. Exp. Cell Res., vol. 50, 151-8) supplemented with 20 g/l sucrose, 500 mg/l casein hydrolysate, 0.8% agar and 5 mg/l 2,4-D at 23° C. in the dark. Cultures are transferred after 4 weeks onto identical fresh medium. Agrobacterium tumefaciens strain carrying a binary plasmid harbouring a selectable marker gene, for example hpt, is used in transformation experiments. One day before transformation, a liquid LB culture including antibiotics is grown on a shaker (28° C., 150 rpm) until an optical density (O.D.) at 600 nm of ˜0.6 is reached. Overnight-grown bacterial cultures are centrifuged and resuspended in MS based inoculation medium (O.D. ˜0.4) including acetosyringone, pH 5.5. Sugarcane embryogenic callus pieces (2-4 mm) are isolated based on morphological characteristics as compact structure and yellow colour and dried for 20 min. in the flow hood followed by immersion in a liquid bacterial inoculation medium for 10-20 minutes. Excess liquid is removed by filter paper blotting. Co-cultivation occurred for 3-5 days in the dark on filter paper which is placed on top of MS based medium incl. B5 vitamins containing 1 mg/l 2,4-D. After co-cultivation calli are washed with sterile water followed by a non-selective cultivation period on similar medium containing 500 mg/l cefotaxime for eliminating remaining Agrobacterium cells. After 3-10 days explants are transferred to MS based selective medium incl. B5 vitamins containing 1 mg/l 2,4-D for another 3 weeks harbouring 25 mg/l of hygromycin (genotype dependent). All treatments are made at 23° C. under dark conditions. Resistant calli are further cultivated on medium lacking 2,4-D including 1 mg/l BA and 25 mg/l hygromycin under 16 h light photoperiod resulting in the development of shoot structures. Shoots are isolated and cultivated on selective rooting medium (MS based including, 20 g/l sucrose, 20 mg/l hygromycin and 500 mg/l cefotaxime). Tissue samples from regenerated shoots are used for DNA analysis. Other transformation methods for sugarcane are known in the art, for example from the in-ternational application published as WO2010/151634A and the granted European patent EP1831378.

### Example 19

### Phenotypic Evaluation Procedure

### 19.1 Evaluation Setup

[0669] Approximately 35 independent TO rice transformants were generated. The primary transformants were transferred from a tissue culture chamber to a greenhouse for growing and harvest of T1 seed. Six events, of which the T1 progeny segregated 3:1 for presence/absence of the transgene, were retained. For each of these events, approximately 10 T1 seedlings containing the transgene (hetero- and homo-zygotes) and approximately 10 T1 seedlings lacking the transgene (nullizygotes) were selected by monitoring visual marker expression. The transgenic plants and the corresponding nullizygotes were grown side-by-side at random positions. Greenhouse conditions were of shorts days (12 hours light), 28° C. in the light and 22° C. in the dark, and a relative humidity of 70%. Plants grown under non-stress conditions were watered at regular intervals to ensure that water and nutrients were not limiting and to satisfy plant needs to complete growth and development.

[0670] From the stage of sowing until the stage of maturity the plants were passed several times through a digital imaging cabinet. At each time point digital images (2048×1536 pixels, 16 million colours) were taken of each plant from at least 6 different angles.

[0671] T1 events can be further evaluated in the T2 generation following the same evaluation procedure as for the T1 generation, e.g. with less events and/or with more individuals per event.

### Drought Screen

[0672] Plants from T2 seeds are grown in potting soil under normal conditions until they approached the heading stage. They are then transferred to a “dry” section where irrigation is withheld. Humidity probes are inserted in randomly chosen pots to monitor the soil water content (SWC). When SWC goes below certain thresholds, the plants are automatically re-watered continuously until a normal level is reached again. The plants are then re-transferred again to normal conditions. The rest of the cultivation (plant maturation, seed harvest) is the same as for plants not grown under abiotic stress conditions. Growth and yield parameters are recorded as detailed for growth under normal conditions.

### Nitrogen Use Efficiency Screen

[0673] Rice plants from T2 seeds are grown in potting soil under normal conditions except for the nutrient solution. The pots are watered from transplantation to maturation with a specific nutrient solution containing reduced N nitrogen (N) content, usually between 7 to 8 times less. The rest of the cultivation (plant maturation, seed harvest) is the same as for plants not grown under abiotic stress. Growth and yield parameters are recorded as detailed for growth under normal conditions.

### Salt Stress Screen

[0674] Plants are grown on a substrate made of coco fibers and argex (3 to 1 ratio). A normal nutrient solution is used during the first two weeks after transplanting the plantlets in the greenhouse. After the first two weeks, 25 mM of salt (NaCl) is added to the nutrient solution, until the plants are harvested. Seed-related parameters are then measured.

### 19.2 Statistical Analysis: F Test

[0675] A two factor ANOVA (analysis of variants) was used as a statistical model for the overall evaluation of plant phenotypic characteristics. An F test was carried out on all the parameters measured of all the plants of all the events transformed with the gene of the present invention. The F test was carried out to check for an effect of the gene over all the transformation events and to verify for an overall effect of the gene, also known as a global gene effect. The threshold for significance for a true global gene effect was set at a 5% probability level for the F test. A significant F test value points to a gene effect, meaning that it is not only the mere presence or position of the gene that is causing the differences in phenotype.

### 19.3 Parameters Measured

[0676] From the stage of sowing until the stage of maturity the plants were passed several times through a digital imaging cabinet. At each time point digital images (2048×1536 pixels, 16 million colours) were taken of each plant from at least 6 different angles as described in WO2010/031780. These measurements were used to determine different parameters.

### Biomass-Related Parameter Measurement

[0677] The plant aboveground area, also named leafy biomass, was determined by counting the total number of pixels on the digital images from aboveground plant parts discriminated from the background. This value was averaged for the pictures taken on the same time point from the different angles and was converted to a physical surface value expressed in square mm by calibration. Experiments show that the aboveground plant area measured this way correlates with the biomass of plant parts above ground. The above ground area is the area measured at the time point at which the plant had reached its maximal leafy biomass.

[0678] Increase in root biomass can be expressed as an increase in total root biomass (measured as maximum biomass of roots observed during the lifespan of a plant); or as an increase in the root/shoot index (measured as the ratio between root mass and shoot mass in the period of active growth of root and shoot). Root biomass can be determined using a method as described in WO 2006/029987.

### Parameters Related to Development Time

[0679] The early vigour is the plant (seedling) aboveground area three weeks post-germination. Early vigour was determined by counting the total number of pixels from aboveground plant parts discriminated from the background. This value was averaged for the pictures taken on the same time point from different angles and was converted to a physical surface value expressed in square mm by calibration.

[0680] The “flowering time” of a plant can be determined using the method as described in WO 2007/093444.

### Seed-Related Parameter Measurements

[0681] The mature primary panicles were harvested, counted, bagged, barcode-labelled and then dried for three days in an oven at 37° C. The panicles were then threshed and all the seeds were collected and counted. The filled husks were separated from the empty ones using an air-blowing device. The empty husks were discarded and the remaining fraction was counted again. The filled husks were weighed on an analytical balance. The number of filled seeds was determined by counting the number of filled husks that remained after the separation step. The total seed yield was measured by weighing all filled husks harvested from a plant. Total seed number per plant was measured by counting the number of husks harvested from a plant. Thousand Kernel Weight (TKW) is extrapolated from the number of filled seeds counted and their total weight. The Harvest Index (HI) in the present invention is defined as the ratio between the total seed yield and the above ground area (mm²), multiplied by a factor 10⁶. The total number of flowers per panicle as defined in the present invention is the ratio between the total number of seeds and the number of mature primary panicles. The seed fill rate as defined in the present invention is the proportion (expressed as a %) of the number of filled seeds over the total number of seeds (or florets).

### Example 20

### Results of the Phenotypic Evaluation of the Transgenic Plants

[0682] The results of the evaluation of transgenic rice plants in the T1 generation and expressing a nucleic acid encoding the polypeptide of SEQ ID NO: 251 under non-stress conditions are presented below in Table I. When grown under non-stress conditions, an increase of 5% or more was observed for parameters related to increased aboveground biomass.

[0683] In addition, when grown under non-stress conditions, an increase of 5% or more was also observed for parameters related to seed yield including total weight of the seeds, thousand kernel weight (TKW), number of filled seeds, number of flowers per panicle, and harvest index.

TABLE I
Data summary for transgenic rice plants; for each parameter,
the overall percent increase is shown for the T1 generation
of plants, for each parameter the p-value is <0.05.

| Parameter | Overall increase |
|---|---|
| totalwgseeds | 19.1 |
| harvestindex | 17.8 |
| nrfilledseed | 15.0 |
| flowerperpan | 17.1 |
| TKW | 5.0 |
| HeightMax | 7.6 |
| GravityYMax | 6.8 |

### Example 21

### Identification of Sequences Related to SEQ ID NO: 746 and SEQ ID NO: 747

[0684] Sequences (full length cDNA, ESTs or genomic) related to SEQ ID NO: 746 and SEQ ID NO: 747 were identified amongst those maintained in the Entrez Nucleotides database at the National Center for Biotechnology Information (NCBI) using database sequence search tools, such as the Basic Local Alignment Tool (BLAST) (Altschul et al. (1990) J. Mol. Biol. 215:403-410; and Altschul et al. (1997) Nucleic Acids Res. 25:3389-3402). The program is used to find regions of local similarity between sequences by comparing nucleic acid or polypeptide sequences to sequence databases and by calculating the statistical significance of matches. For example, the polypeptide encoded by the nucleic acid of SEQ ID NO: 746 was used for the TBLASTN algorithm, with default settings and the filter to ignore low complexity sequences set off. The output of the analysis was viewed by pairwise comparison, and ranked according to the probability score (E-value), where the score reflect the probability that a particular alignment occurs by chance (the lower the E-value, the more significant the hit). In addition to E-values, comparisons were also scored by percentage identity. Percentage identity refers to the number of identical nucleotides (or amino acids) between the two compared nucleic acid (or polypeptide) sequences over a particular length. In some instances, the default parameters may be adjusted to modify the stringency of the search. For example the E-value may be increased to show less stringent matches. This way, short nearly exact matches may be identified.

[0685] Table J refers to SEQ ID NO: 746 and SEQ ID NO: 747 and provides a list of nucleic acid sequences related to SEQ ID NO: 746 and SEQ ID NO: 747.

TABLE J
Examples of ZPR nucleic acids and polypeptides

| | Nucleic | Protein |
|---|---|---|
| | acid SEQ | SEQ ID |
| Plant Source | ID NO: | NO: |
| S. lycopersicum_TC205388#1 | 746 | 747 |
| Pt_ZPR_small_Lzipper | 748 | 749 |
| A. hypogaea_EG373732#1 | 750 | 751 |
| A. lyrata_322199#1 | 752 | 753 |
| A. lyrata_899056#1 | 754 | 755 |
| A. thaliana_AT2G45450.1 | 756 | 757 |
| A. thaliana_AT3G60890.1#1 | 758 | 759 |
| A. trichopoda_CK765457#1 | 760 | 761 |
| B. napus_CD822359#1 | 762 | 763 |
| C. annuum_TC13916#1 | 764 | 765 |
| C. intybus_EH709619#1 | 766 | 767 |
| C. melo_EB715099#1 | 768 | 769 |
| C. sinensis_TC13047#1 | 770 | 771 |
| C. tinctorius_EL400918#1 | 772 | 773 |
| E. tef_DN482990#1 | 774 | 775 |
| E. tirucalli_BP956571#1 | 776 | 777 |
| G. hirsutum_DW501389#1 | 778 | 779 |
| G. hirsutum_DW518216#1 | 780 | 781 |
| G. hirsutum_TC163217#1 | 782 | 783 |
| G. hybrid_AJ765000#1 | 784 | 785 |
| G. max_Glyma01g34620.1#1 | 786 | 787 |
| G. max_Glyma09g40450.1#1 | 788 | 789 |
| G. max_GM06MC39606_50673886@38431#1 | 790 | 791 |
| G. max_GM06MSsu40h07.r_46819511@70598#1 | 792 | 793 |
| G. max_TC281725#1 | 794 | 795 |
| G. max_TC286014#1 | 796 | 797 |
| G. max_TC305219#1 | 798 | 799 |
| L. perennis_TA2167_43195#1 | 800 | 801 |
| L. sativa_TC25720#1 | 802 | 803 |
| L. serriola_DW114794#1 | 804 | 805 |
| L. serriola_DW122307#1 | 806 | 807 |
| L. virosa_DW156764#1 | 808 | 809 |
| M. domestica_TC51427#1 | 810 | 811 |
| N. tabacum_TC60414#1 | 812 | 813 |
| O. sativa_LOC_Os09g34890.1#1 | 814 | 815 |
| Os_ZPRa_Os09g0520500 | 816 | 817 |
| P. abies_AM172974#1 | 818 | 819 |
| P. deltoides_TA3399_3696#1 | 820 | 821 |
| P. sitchensis_TA14065_3332#1 | 822 | 823 |
| P. tremula_TA8085_113636#1 | 824 | 825 |
| P. trichocarpa_554264#1 | 826 | 827 |
| P. trichocarpa_823907#1 | 828 | 829 |
| P. vulgaris_FE900059#1 | 830 | 831 |
| R. chinensis_BI978399#1 | 832 | 833 |
| S. bicolor_Sb02g030180.1#1 | 834 | 835 |
| S. hybrid_CF573336#1 | 836 | 837 |
| S. hybrid_CF575621#1 | 838 | 839 |
| S. lycopersicum_TC207895#1 | 840 | 841 |
| S. propinquum_TA5427_132711#1 | 842 | 843 |
| S. tuberosum_EG011112#1 | 844 | 845 |
| S. tuberosum_TC176950#1 | 846 | 847 |
| T. cacao_CU522069#1 | 848 | 849 |
| T. cacao_TC3649#1 | 850 | 851 |
| T. cryptomerioides_DN975845#1 | 852 | 853 |
| Triphysaria_sp_TC4136#1 | 854 | 855 |
| V. vinifera_GSVIVT00001026001#1 | 856 | 857 |
| V. vinifera_GSVIVT00026366001#1 | 858 | 859 |
| Z. mays_BG842570#1 | 860 | 861 |
| Z. mays_c62174110gm030403@15401#1 | 862 | 863 |
| Z. mays_c62219732gm030403@9841#1 | 864 | 865 |
| Z. mays_TC477977#1 | 866 | 867 |
| Z. mays_TC529546#1 | 868 | 869 |
| Z. mays_ZM07MC28025_BFb0123H02@27941#1 | 870 | 871 |
| Zeama_ZmPC0129214_ZPRB | 872 | 873 |
| A. thaliana_AT2G36307.1 | 874 | 875 |
| A. thaliana_AT3G52770.1 | 876 | 877 |
| B. napus_BN06MC24768_49494820@24676#1 | 878 | 879 |
| H. annuus_CD854488#1 | 880 | 881 |
| H. vulgare_TC169924#1 | 882 | 883 |
| L. perennis_DW077975#1 | 884 | 885 |
| M. truncatula_AC154034_39.5#1 | 886 | 887 |
| N. tabacum_AM841801#1 | 888 | 889 |
| O. sativa_LOC_Os04g33560.1#1 | 890 | 891 |
| Os_ZPRc_Os02g0530500 | 892 | 893 |
| Os_ZPRd_Os12g05560 | 894 | 895 |
| Os_ZPRe_Os11g05430 | 896 | 897 |
| P. trichocarpa_548562#1 | 898 | 899 |
| P. trichocarpa_560740#1 | 900 | 901 |
| Pt_ZPR3 | 902 | 903 |
| R. hybrid_EC587934#1 | 904 | 905 |
| S. bicolor_Sb04g021620.1#1 | 906 | 907 |
| S. bicolor_Sb06g015480.1#1 | 908 | 909 |
| V. vinifera_GSVIVT00021631001#1 | 910 | 911 |
| Z. mays_c62080453gm030403@7498#1 | 912 | 913 |
| Z. mays_TC487620#1 | 914 | 915 |
| Z. mays_TC492042#1 | 916 | 917 |
| Z. mays_ZM07MC37474_BFb0118O06@37348#1 | 918 | 919 |
| Zea_mays_AC217051.3_FGT005#1 | 920 | 921 |
| Zea_mays_GRMZM2G062504_T01#1 | 922 | 923 |
| Zeama_Zmcl15605_1_ZPRA | 924 | 925 |

[0686] Sequences have been tentatively assembled and publicly disclosed by research institutions, such as The Institute for Genomic Research (TIGR; beginning with TA). For instance, the Eukaryotic Gene Orthologs (EGO) database may be used to identify such related sequences, either by keyword search or by using the BLAST algorithm with the nucleic acid sequence or polypeptide sequence of interest. Special nucleic acid sequence databases have been created for particular organisms, e.g. for certain prokaryotic organisms, such as by the Joint Genome Institute. Furthermore, access to proprietary databases, has allowed the identification of novel nucleic acid and polypeptide sequences.

### Example 22

### Alignment of ZPR polypeptide Sequences

[0687] Alignment of polypeptide sequences was performed using MAFFT (version 6.624, L-INS-I method—Katoh and Toh (2008)—Briefings in Bioinformatics 9:286-298). Minor manual editing was done to further optimize the alignment. A representative number of ZPR polypeptides are aligned in FIG. 13. The represented ZPR polypeptides are characterized in that the Leucine Zipper domain is located in the central to C-terminal region of said ZPR polypeptide.

### Example 23

### Calculation of Global Percentage Identity Between Polypeptide Sequences

[0688] Global percentages of similarity and identity between full length polypeptide sequences useful in performing the methods of the invention were determined using one of the methods available in the art, the MatGAT (Matrix Global Alignment Tool) software (BMC Bioinformatics. 2003 4:29. MatGAT: an application that generates similarity/identity matrices using protein or DNA sequences. Campanella J J, Bitincka L, Smalley J; software hosted by Ledion Bitincka). MatGAT software generates similarity/identity matrices for DNA or protein sequences without needing pre-alignment of the data. The program performs a series of pair-wise alignments using the Myers and Miller global alignment algorithm (with a gap opening penalty of 12, and a gap extension penalty of 2), calculates similarity and identity using for example Blosum 62 (for polypeptides), and then places the results in a distance matrix.

[0689] Results of the analysis are shown in FIG. 14 for the global similarity and identity over the full length of a representative number of polypeptide sequences. Sequence similarity is shown in the bottom half of the dividing line and sequence identity is shown in the top half of the diagonal dividing line. Parameters used in the comparison were: Scoring matrix: Blosum62, First Gap: 12, Extending Gap: 2. The sequence identity (in %) between the ZPR polypeptide sequences useful in performing the methods of the invention is generally higher than 20% compared to SEQ ID NO: 747.

### Example 24

### Identification of Domains Comprised in Polypeptide Sequences Useful in Performing the Methods of the Invention

[0690] The Integrated Resource of Protein Families, Domains and Sites (InterPro) database is an integrated interface for the commonly used signature databases for text- and sequence-based searches. The InterPro database combines these databases, which use different methodologies and varying degrees of biological information about well-characterized proteins to derive protein signatures. Collaborating databases include SWISS-PROT, PROSITE, TrEMBL, PRINTS, ProDom and Pfam, Smart and TIGRFAMs. Pfam is a large collection of multiple sequence alignments and hidden Markov models covering many common protein domains and families. Pfam is hosted at the Sanger Institute server in the United Kingdom. Interpro is hosted at the European Bioinformatics Institute in the United Kingdom.

### Example 25

### Topology Prediction of the ZPR Polypeptide Sequences

[0691] TargetP 1.1 predicts the subcellular location of eukaryotic proteins. The location assignment is based on the predicted presence of any of the N-terminal pre-sequences: chloroplast transit peptide (cTP), mitochondrial targeting peptide (mTP) or secretory pathway signal peptide (SP). Scores on which the final prediction is based are not really probabilities, and they do not necessarily add to one. However, the location with the highest score is the most likely according to TargetP, and the relationship between the scores (the reliability class) may be an indication of how certain the prediction is. The reliability class (RC) ranges from 1 to 5, where 1 indicates the strongest prediction. TargetP is maintained at the server of the Technical University of Denmark.

[0692] For the sequences predicted to contain an N-terminal presequence a potential cleavage site can also be predicted.

[0693] A number of parameters can be selected, such as organism group (non-plant or plant), cutoff sets (none, predefined set of cutoffs, or user-specified set of cutoffs), and the calculation of prediction of cleavage sites (yes or no).

[0694] Many other algorithms can be used to perform such analyses, including:
[0695] ChloroP 1.1 hosted on the server of the Technical University of Denmark;
[0696] Protein Prowler Subcellular Localisation Predictor version 1.2 hosted on the server of the Institute for Molecular Bioscience, University of Queensland, Brisbane, Australia;
[0697] PENCE Proteome Analyst PA-GOSUB 2.5 hosted on the server of the University of Alberta, Edmonton, Alberta, Canada;
[0698] TMHMM, hosted on the server of the Technical University of Denmark
[0699] PSORT (URL: psort.org)
[0700] PLOC (Park and Kanehisa, Bioinformatics, 19, 1656-1663, 2003).

### Example 26

### Functional Assay for a ZPR Polypeptide

[0701] LITTLE ZIPPER (ZPR) genes have HD-ZIPIII-suppressing activity and are transcriptionally upregulated by HD-ZIPIII activity (see Wenkel et al. (2007). Wenkel et al. (2007) described that the structural features of ZPR proteins, and their induction by HD-ZIPIII activity, suggest a model for the action of the ZPR genes as part of a negative feedback loop on HD-ZIPIII function. In the regulatory module proposed by Wenkel et al. (2007), HD-ZIPIII proteins activate transcription of the ZPR genes. The ZPR proteins then form heterodimers with the HD-ZIPIII proteins, preventing or altering their DNA binding.

[0702] Kim et al. (2008) demonstrated that a small ZIP protein, ZPR3, and its functionally redundant homolog, ZPR4, negatively regulate the HD-ZIP III activity in Shoot apical meristem (SAM) development. ZPR3 directly interacts with PHABULOSA (PHB) and other HD-ZIP III proteins via the ZIP motifs and forms nonfunctional heterodimers. In view thereof, Kim et al. (2008) proposed that HD-ZIPIII activity in regulating SAM is modulated by, among other things, a feedback loop involving the competitive inhibitors ZPR3 and ZPR4.

### Example 27

### Cloning of the ZPR Encoding Nucleic Acid Sequence

[0703] The nucleic acid sequence was amplified by PCR using as template a custom-made Solanum lycopersicum seedlings cDNA library. PCR was performed using a commercially available proofreading Taq DNA polymerase in standard conditions, using 200 ng of template in a 50 μl PCR mix. The primers used were prm15860 (SEQ ID NO: 926; sense): prm15860: 5′ ggggacaagtttgtacaaaaaagcaggcttaaacaatgtgtcatgcaatttcagatcat 3′ and prm15859 (SEQ ID NO: 927; reverse, complementary): 5′-ggggaccactttgtacaaga aagctgggtctaattgtgattattagagggttgagaa 3′, which include the AttB sites for Gateway recombination. The amplified PCR fragment was purified also using standard methods. The first step of the Gateway procedure, the BP reaction, was then performed, during which the PCR fragment recombined in vivo with the pDONR201 plasmid to produce, according to the Gateway terminology, an “entry clone”, pZPR. Plasmid pDONR201 was purchased from Invitrogen, as part of the Gateway® technology.

[0704] The entry clone comprising SEQ ID NO: 746 was then used in an LR reaction with a destination vector used for Oryza sativa transformation. This vector contained as functional elements within the T-DNA borders: a plant selectable marker; a screenable marker expression cassette; and a Gateway cassette intended for LR in vivo recombination with the nucleic acid sequence of interest already cloned in the entry clone. A rice GOS2 promoter (SEQ ID NO: 928) for constitutive expression was located upstream of this Gateway cassette.

[0705] After the LR recombination step, the resulting expression vector pGOS2::ZPR (FIG. 15) was transformed into Agrobacterium strain LBA4044 according to methods well known in the art.

### Example 28

### Plant Transformation

### Rice Transformation

[0706] The Agrobacterium containing the expression vector was used to transform Oryza sativa plants. Mature dry seeds of the rice japonica cultivar Nipponbare were dehusked. Sterilization was carried out by incubating for one minute in 70% ethanol, followed by 30 minutes in 0.2% HgCl₂, followed by a 6 times 15 minutes wash with sterile distilled water. The sterile seeds were then germinated on a medium containing 2,4-D (callus induction medium). After incubation in the dark for four weeks, embryogenic, scutellum-derived calli were excised and propagated on the same medium. After two weeks, the calli were multiplied or propagated by subculture on the same medium for another 2 weeks. Embryogenic callus pieces were sub-cultured on fresh medium 3 days before co-cultivation (to boost cell division activity).

[0707] Agrobacterium strain LBA4404 containing the expression vector was used for co-cultivation. Agrobacterium was inoculated on AB medium with the appropriate antibiotics and cultured for 3 days at 28° C. The bacteria were then collected and suspended in liquid co-cultivation medium to a density (OD₆₀₀) of about 1. The suspension was then transferred to a Petri dish and the calli immersed in the suspension for 15 minutes. The callus tissues were then blotted dry on a filter paper and transferred to solidified, co-cultivation medium and incubated for 3 days in the dark at 25° C. Co-cultivated calli were grown on 2,4-D-containing medium for 4 weeks in the dark at 28° C. in the presence of a selection agent. During this period, rapidly growing resistant callus islands developed. After transfer of this material to a regeneration medium and incubation in the light, the embryogenic potential was released and shoots developed in the next four to five weeks. Shoots were excised from the calli and incubated for 2 to 3 weeks on an auxin-containing medium from which they were transferred to soil. Hardened shoots were grown under high humidity and short days in a greenhouse.

[0708] Approximately 35 independent TO rice transformants were generated for one construct. The primary transformants were transferred from a tissue culture chamber to a greenhouse. After a quantitative PCR analysis to verify copy number of the T-DNA insert, only single copy transgenic plants that exhibit tolerance to the selection agent were kept for harvest of T1 seed. Seeds were then harvested three to five months after transplanting. The method yielded single locus transformants at a rate of over 50% (Aldemita and Hodges1996, Chan et al. 1993, Hiei et al. 1994).

### Example 29

### Transformation of Other Crops

### Corn Transformation

[0709] Transformation of maize (Zea mays) is performed with a modification of the method described by Ishida et al. (1996) Nature Biotech 14(6): 745-50. Transformation is genotype-dependent in corn and only specific genotypes are amenable to transformation and regeneration. The inbred line A188 (University of Minnesota) or hybrids with A188 as a parent are good sources of donor material for transformation, but other genotypes can be used successfully as well. Ears are harvested from corn plant approximately 11 days after pollination (DAP) when the length of the immature embryo is about 1 to 1.2 mm. Immature embryos are cocultivated with Agrobacterium tumefaciens containing the expression vector, and transgenic plants are recovered through organogenesis. Excised embryos are grown on callus induction medium, then maize regeneration medium, containing the selection agent (for example imidazolinone but various selection markers can be used). The Petri plates are incubated in the light at 25° C. for 2-3 weeks, or until shoots develop. The green shoots are transferred from each embryo to maize rooting medium and incubated at 25° C. for 2-3 weeks, until roots develop. The rooted shoots are transplanted to soil in the greenhouse. T1 seeds are produced from plants that exhibit tolerance to the selection agent and that contain a single copy of the T-DNA insert.

### Wheat Transformation

[0710] Transformation of wheat is performed with the method described by Ishida et al. (1996) Nature Biotech 14(6): 745-50. The cultivar Bobwhite (available from CIMMYT, Mexico) is commonly used in transformation. Immature embryos are co-cultivated with Agrobacterium tumefaciens containing the expression vector, and transgenic plants are recovered through organogenesis. After incubation with Agrobacterium, the embryos are grown in vitro on callus induction medium, then regeneration medium, containing the selection agent (for example imidazolinone but various selection markers can be used). The Petri plates are incubated in the light at 25° C. for 2-3 weeks, or until shoots develop. The green shoots are transferred from each embryo to rooting medium and incubated at 25° C. for 2-3 weeks, until roots develop. The rooted shoots are transplanted to soil in the greenhouse. T1 seeds are produced from plants that exhibit tolerance to the selection agent and that contain a single copy of the T-DNA insert.

### Soybean Transformation

[0711] Soybean is transformed according to a modification of the method described in the Texas A&M U.S. Pat. No. 5,164,310. Several commercial soybean varieties are amenable to transformation by this method. The cultivar Jack (available from the Illinois Seed foundation) is commonly used for transformation. Soybean seeds are sterilised for in vitro sowing. The hypocotyl, the radicle and one cotyledon are excised from seven-day old young seedlings. The epicotyl and the remaining cotyledon are further grown to develop axillary nodes. These axillary nodes are excised and incubated with Agrobacterium tumefaciens containing the expression vector. After the cocultivation treatment, the explants are washed and transferred to selection media. Regenerated shoots are excised and placed on a shoot elongation medium. Shoots no longer than 1 cm are placed on rooting medium until roots develop. The rooted shoots are transplanted to soil in the greenhouse. T1 seeds are produced from plants that exhibit tolerance to the selection agent and that contain a single copy of the T-DNA insert.

### Rapeseed/Canola Transformation

[0712] Cotyledonary petioles and hypocotyls of 5-6 day old young seedling are used as explants for tissue culture and transformed according to Babic et al. (1998, Plant Cell Rep 17: 183-188). The commercial cultivar Westar (Agriculture Canada) is the standard variety used for transformation, but other varieties can also be used. Canola seeds are surface-sterilized for in vitro sowing. The cotyledon petiole explants with the cotyledon attached are excised from the in vitro seedlings, and inoculated with Agrobacterium (containing the expression vector) by dipping the cut end of the petiole explant into the bacterial suspension. The explants are then cultured for 2 days on MSBAP-3 medium containing 3 mg/l BAP, 3% sucrose, 0.7 Phytagar at 23° C., 16 hr light. After two days of co-cultivation with Agrobacterium, the petiole explants are transferred to MSBAP-3 medium containing 3 mg/l BAP, cefotaxime, carbenicillin, or timentin (300 mg/l) for 7 days, and then cultured on MSBAP-3 medium with cefotaxime, carbenicillin, or timentin and selection agent until shoot regeneration. When the shoots are 5-10 mm in length, they are cut and transferred to shoot elongation medium (MSBAP-0.5, containing 0.5 mg/l BAP). Shoots of about 2 cm in length are transferred to the rooting medium (MS0) for root induction. The rooted shoots are transplanted to soil in the greenhouse. T1 seeds are produced from plants that exhibit tolerance to the selection agent and that contain a single copy of the T-DNA insert.

### Alfalfa Transformation

[0713] A regenerating clone of alfalfa (Medicago sativa) is transformed using the method of (McKersie et al., 1999 Plant Physiol 119: 839-847). Regeneration and transformation of alfalfa is genotype dependent and therefore a regenerating plant is required. Methods to obtain regenerating plants have been described. For example, these can be selected from the cultivar Rangelander (Agriculture Canada) or any other commercial alfalfa variety as described by Brown D C W and A Atanassov (1985. Plant Cell Tissue Organ Culture 4: 111-112). Alternatively, the RA3 variety (University of Wisconsin) has been selected for use in tissue culture (Walker et al., 1978 Am J Bot 65:654-659). Petiole explants are cocultivated with an overnight culture of Agrobacterium tumefaciens C58C1 pMP90 (McKersie et al., 1999 Plant Physiol 119: 839-847) or LBA4404 containing the expression vector. The explants are cocultivated for 3 d in the dark on SH induction medium containing 288 mg/L Pro, 53 mg/L thioproline, 4.35 g/L K2504, and 100 μm acetosyringinone. The explants are washed in half-strength Murashige-Skoog medium (Murashige and Skoog, 1962) and plated on the same SH induction medium without acetosyringinone but with a suitable selection agent and suitable antibiotic to inhibit Agrobacterium growth. After several weeks, somatic embryos are transferred to BOi2Y development medium containing no growth regulators, no antibiotics, and 50 g/L sucrose. Somatic embryos are subsequently germinated on half-strength Murashige-Skoog medium. Rooted seedlings were transplanted into pots and grown in a greenhouse. T1 seeds are produced from plants that exhibit tolerance to the selection agent and that contain a single copy of the T-DNA insert.

### Cotton Transformation

[0714] Cotton is transformed using Agrobacterium tumefaciens according to the method described in U.S. Pat. No. 5,159,135. Cotton seeds are surface sterilised in 3% sodium hypochlorite solution during 20 minutes and washed in distilled water with 500 μg/ml cefotaxime. The seeds are then transferred to SH-medium with 50 μg/ml benomyl for germination. Hypocotyls of 4 to 6 days old seedlings are removed, cut into 0.5 cm pieces and are placed on 0.8% agar. An Agrobacterium suspension (approx. 108 cells per ml, diluted from an overnight culture transformed with the gene of interest and suitable selection markers) is used for inoculation of the hypocotyl explants. After 3 days at room temperature and lighting, the tissues are transferred to a solid medium (1.6 g/l Gelrite) with Murashige and Skoog salts with B5 vitamins (Gamborg et al., Exp. Cell Res. 50:151-158 (1968)), 0.1 mg/l 2,4-D, 0.1 mg/l 6-furfurylaminopurine and 750 μg/ml MgCL2, and with 50 to 100 μg/ml cefotaxime and 400-500 μg/ml carbenicillin to kill residual bacteria. Individual cell lines are isolated after two to three months (with subcultures every four to six weeks) and are further cultivated on selective medium for tissue amplification (30° C., 16 hr photoperiod). Transformed tissues are subsequently further cultivated on non-selective medium during 2 to 3 months to give rise to somatic embryos. Healthy looking embryos of at least 4 mm length are transferred to tubes with SH medium in fine vermiculite, supplemented with 0.1 mg/l indole acetic acid, 6 furfurylaminopurine and gibberellic acid. The embryos are cultivated at 30° C. with a photoperiod of 16 hrs, and plantlets at the 2 to 3 leaf stage are transferred to pots with vermiculite and nutrients. The plants are hardened and subsequently moved to the greenhouse for further cultivation.

### Sugarbeet Transformation

[0715] Seeds of sugarbeet (Beta vulgaris L.) are sterilized in 70% ethanol for one minute followed by 20 min. shaking in 20% Hypochlorite bleach e.g. Clorox® regular bleach (commercially available from Clorox, 1221 Broadway, Oakland, Calif. 94612, USA). Seeds are rinsed with sterile water and air dried followed by plating onto germinating medium (Murashige and Skoog (MS) based medium (Murashige, T., and Skoog, 1962. Physiol. Plant, vol. 15, 473-497) including B5 vitamins (Gamborg et al.; Exp. Cell Res., vol. 50, 151-8.) supplemented with 10 g/l sucrose and 0.8% agar). Hypocotyl tissue is used essentially for the initiation of shoot cultures according to Hussey and Hepher (Hussey, G., and Hepher, A., 1978. Annals of Botany, 42, 477-9) and are maintained on MS based medium supplemented with 30 g/l sucrose plus 0.25 mg/l benzylamino purine and 0.75% agar, pH 5.8 at 23-25° C. with a 16-hour photoperiod. Agrobacterium tumefaciens strain carrying a binary plasmid harbouring a selectable marker gene, for example nptII, is used in transformation experiments. One day before transformation, a liquid LB culture including antibiotics is grown on a shaker (28° C., 150 rpm) until an optical density (O.D.) at 600 nm of ˜1 is reached. Overnight-grown bacterial cultures are centrifuged and resuspended in inoculation medium (O.D. ˜1) including Acetosyringone, pH 5.5. Shoot base tissue is cut into slices (1.0 cm×1.0 cm×2.0 mm approximately). Tissue is immersed for 30 s in liquid bacterial inoculation medium. Excess liquid is removed by filter paper blotting. Co-cultivation occurred for 24-72 hours on MS based medium incl. 30 g/l sucrose followed by a non-selective period including MS based medium, 30 g/l sucrose with 1 mg/l BAP to induce shoot development and cefotaxim for eliminating the Agrobacterium. After 3-10 days explants are transferred to similar selective medium harbouring for example kanamycin or G418 (50-100 mg/l genotype dependent). Tissues are transferred to fresh medium every 2-3 weeks to maintain selection pressure. The very rapid initiation of shoots (after 3-4 days) indicates regeneration of existing meristems rather than organogenesis of newly developed transgenic meristems. Small shoots are transferred after several rounds of subculture to root induction medium containing 5 mg/l NAA and kanamycin or G418. Additional steps are taken to reduce the potential of generating transformed plants that are chimeric (partially transgenic). Tissue samples from regenerated shoots are used for DNA analysis. Other transformation methods for sugarbeet are known in the art, for example those by Linsey & Gallois (Linsey, K., and Gallois, P., 1990. Journal of Experimental Botany; vol. 41, No. 226; 529-36) or the methods published in the international application published as WO9623891A.

### Sugarcane Transformation

[0716] Spindles are isolated from 6-month-old field grown sugarcane plants (see Arencibia et al., 1998. Transgenic Research, vol. 7, 213-22; Enriquez-Obregon et al., 1998. Planta, vol. 206, 20-27). Material is sterilized by immersion in a 20% Hypochlorite bleach e.g. Clorox® regular bleach (commercially available from Clorox, 1221 Broadway, Oakland, Calif. 94612, USA) for 20 minutes. Transverse sections around 0.5 cm are placed on the medium in the top-up direction. Plant material is cultivated for 4 weeks on MS (Murashige, T., and Skoog, 1962. Physiol. Plant, vol. 15, 473-497) based medium incl. B5 vitamins (Gamborg, O., et al., 1968. Exp. Cell Res., vol. 50, 151-8) supplemented with 20 g/l sucrose, 500 mg/l casein hydrolysate, 0.8% agar and 5 mg/l 2,4-D at 23° C. in the dark. Cultures are transferred after 4 weeks onto identical fresh medium. Agrobacterium tumefaciens strain carrying a binary plasmid harbouring a selectable marker gene, for example hpt, is used in transformation experiments. One day before transformation, a liquid LB culture including antibiotics is grown on a shaker (28° C., 150 rpm) until an optical density (O.D.) at 600 nm of ˜0.6 is reached. Overnight-grown bacterial cultures are centrifuged and resuspended in MS based inoculation medium (O.D. ˜0.4) including acetosyringone, pH 5.5. Sugarcane embryogenic callus pieces (2-4 mm) are isolated based on morphological characteristics as compact structure and yellow colour and dried for 20 min. in the flow hood followed by immersion in a liquid bacterial inoculation medium for 10-20 minutes. Excess liquid is removed by filter paper blotting. Co-cultivation occurred for 3-5 days in the dark on filter paper which is placed on top of MS based medium incl. B5 vitamins containing 1 mg/l 2,4-D. After co-cultivation calli are washed with sterile water followed by a non-selective cultivation period on similar medium containing 500 mg/l cefotaxime for eliminating remaining Agrobacterium cells. After 3-10 days explants are transferred to MS based selective medium incl. B5 vitamins containing 1 mg/l 2,4-D for another 3 weeks harbouring 25 mg/l of hygromycin (genotype dependent). All treatments are made at 23° C. under dark conditions. Resistant calli are further cultivated on medium lacking 2,4-D including 1 mg/l BA and 25 mg/l hygromycin under 16 h light photoperiod resulting in the development of shoot structures. Shoots are isolated and cultivated on selective rooting medium (MS based including, 20 g/l sucrose, 20 mg/l hygromycin and 500 mg/l cefotaxime). Tissue samples from regenerated shoots are used for DNA analysis. Other transformation methods for sugarcane are known in the art, for example from the in-ternational application published as WO2010/151634A and the granted European patent EP1831378.

### Example 30

### Phenotypic Evaluation Procedure

### 30.1 Evaluation Setup

[0717] Approximately 35 independent TO rice transformants were generated. The primary transformants were transferred from a tissue culture chamber to a greenhouse for growing and harvest of T1 seed. Six events, of which the T1 progeny segregated 3:1 for presence/absence of the transgene, were retained. For each of these events, approximately 10 T1 seedlings containing the transgene (hetero- and homo-zygotes) and approximately 10 T1 seedlings lacking the transgene (nullizygotes) were selected by monitoring visual marker expression. The transgenic plants and the corresponding nullizygotes were grown side-by-side at random positions. Greenhouse conditions were of shorts days (12 hours light), 28° C. in the light and 22° C. in the dark, and a relative humidity of 70%. Plants grown under non-stress conditions were watered at regular intervals to ensure that water and nutrients were not limiting and to satisfy plant needs to complete growth and development, unless they were used in a stress screen.

[0718] From the stage of sowing until the stage of maturity the plants were passed several times through a digital imaging cabinet. At each time point digital images (2048×1536 pixels, 16 million colours) were taken of each plant from at least 6 different angles.

[0719] T1 events can be further evaluated in the T2 generation following the same evaluation procedure as for the T1 generation, e.g. with less events and/or with more individuals per event.

### Drought Screen

[0720] T1 or T2 plants are grown in potting soil under normal conditions until they approached the heading stage. They are then transferred to a “dry” section where irrigation is withheld. Soil moisture probes are inserted in randomly chosen pots to monitor the soil water content (SWC). When SWC goes below certain thresholds, the plants are automatically re-watered continuously until a normal level is reached again. The plants are then re-transferred again to normal conditions. The rest of the cultivation (plant maturation, seed harvest) is the same as for plants not grown under abiotic stress conditions. Growth and yield parameters are recorded as detailed for growth under normal conditions.

### Nitrogen Use Efficiency Screen

[0721] T1 or T2 plants are grown in potting soil under normal conditions except for the nutrient solution. The pots are watered from transplantation to maturation with a specific nutrient solution containing reduced N nitrogen (N) content, usually between 7 to 8 times less. The rest of the cultivation (plant maturation, seed harvest) is the same as for plants not grown under abiotic stress. Growth and yield parameters are recorded as detailed for growth under normal conditions.

### Salt Stress Screen

[0722] T1 or T2 plants are grown on a substrate made of coco fibers and particles of baked clay (Argex) (3 to 1 ratio). A normal nutrient solution is used during the first two weeks after transplanting the plantlets in the greenhouse. After the first two weeks, 25 mM of salt (NaCl) is added to the nutrient solution, until the plants are harvested. Growth and yield parameters are recorded as detailed for growth under normal conditions.

### 30.2 Statistical Analysis: F Test

[0723] A two factor ANOVA (analysis of variants) was used as a statistical model for the overall evaluation of plant phenotypic characteristics. An F test was carried out on all the parameters measured of all the plants of all the events transformed with the gene of the present invention. The F test was carried out to check for an effect of the gene over all the transformation events and to verify for an overall effect of the gene, also known as a global gene effect. The threshold for significance for a true global gene effect was set at a 5% probability level for the F test. A significant F test value points to a gene effect, meaning that it is not only the mere presence or position of the gene that is causing the differences in phenotype.

### 30.3 Parameters Measured

[0724] From the stage of sowing until the stage of maturity the plants were passed several times through a digital imaging cabinet. At each time point digital images (2048×1536 pixels, 16 million colours) were taken of each plant from at least 6 different angles as described in WO2010/031780. These measurements were used to determine different parameters.

### Biomass-Related Parameter Measurement

[0725] The plant aboveground area (or leafy biomass) was determined by counting the total number of pixels on the digital images from aboveground plant parts discriminated from the background. This value was averaged for the pictures taken on the same time point from the different angles and was converted to a physical surface value expressed in square mm by calibration. Experiments show that the aboveground plant area measured this way correlates with the biomass of plant parts above ground. The above ground area is the area measured at the time point at which the plant had reached its maximal leafy biomass.

[0726] Increase in root biomass is expressed as an increase in total root biomass (measured as maximum biomass of roots observed during the lifespan of a plant); or as an increase in the root/shoot index, measured as the ratio between root mass and shoot mass in the period of active growth of root and shoot. In other words, the root/shoot index is defined as the ratio of the rapidity of root growth to the rapidity of shoot growth in the period of active growth of root and shoot. Root biomass can be determined using a method as described in WO 2006/029987.

### Parameters Related to Development Time

[0727] The early vigour is the plant aboveground area three weeks post-germination. Early vigour was determined by counting the total number of pixels from aboveground plant parts discriminated from the background. This value was averaged for the pictures taken on the same time point from different angles and was converted to a physical surface value expressed in square mm by calibration.

[0728] AreaEmer is an indication of quick early development when this value is decreased compared to control plants. It is the ratio (expressed in %) between the time a plant needs to make 30% of the final biomass and the time needs to make 90% of its final biomass.

[0729] The “time to flower” or “flowering time” of the plant can be determined using the method as described in WO 2007/093444.

### Seed-Related Parameter Measurements

[0730] The mature primary panicles were harvested, counted, bagged, barcode-labelled and then dried for three days in an oven at 37° C. The panicles were then threshed and all the seeds were collected and counted. The seeds are usually covered by a dry outer covering, the husk. The filled husks (herein also named filled florets) were separated from the empty ones using an air-blowing device. The empty husks were discarded and the remaining fraction was counted again. The filled husks were weighed on an analytical balance.

[0731] The total number of seeds was determined by counting the number of filled husks that remained after the separation step. The total seed weight was measured by weighing all filled husks harvested from a plant.

[0732] The total number of seeds (or florets) per plant was determined by counting the number of husks (whether filled or not) harvested from a plant.

[0733] Thousand Kernel Weight (TKW) is extrapolated from the number of seeds counted and their total weight.

[0734] The Harvest Index (HI) in the present invention is defined as the ratio between the total seed weight and the above ground area (mm²), multiplied by a factor 10⁶.

[0735] The number of flowers per panicle as defined in the present invention is the ratio between the total number of seeds over the number of mature primary panicles.

[0736] The “seed fill rate” or “seed filling rate” as defined in the present invention is the proportion (expressed as a %) of the number of filled seeds (i.e. florets containing seeds) over the total number of seeds (i.e. total number of florets). In other words, the seed filling rate is the percentage of florets that are filled with seed.

### Example 31

### Results of the Phenotypic Evaluation of the Transgenic Plants

[0737] The results of the evaluation of transgenic rice plants in the T1 generation and expressing a nucleic acid encoding the ZPR polypeptide of SEQ ID NO: 747 under non-stress conditions are presented below in Table C. When grown under non-stress conditions, an increase of at least 5% was observed for seed yield, including total weight of seeds, fill rate, number of filled seeds, harvest index, and number of flowers per panicle.

TABLE K
Data summary for transgenic rice plants; for each parameter,
the overall percent increase is shown for the confirmation (T2
generation), for each parameter the p-value is <0.05.

| Parameter | Overall increase |
|---|---|
| totalwgseeds | 21.5 |
| fillrate | 21.1 |
| harvestindex | 18.4 |
| nrfilledseed | 19.8 |
| flowerperpan | 5.7 |

The application's sequence listing, which the Patent Office published only in electronic form, follows.

SEQUENCE LISTING (937 sequences)

SEQ ID NO: 1 - DNA, 972 bp, Oryza sativa
atgccgcgctatgatgatcgttatggaagcacgcgcttgtatgttggtagactgtcttcccgcactcgttctcgtgacctagaataccatttcagcagatatggaagaatacgtgaagtggagttgaagcgcgactacgcatttattgagttcagtgatccccgtgatgctgaggaagcaaggtacaaccttgatggcagggatgttgatggaagccgcattcttgttgagtttgctaaaggggttccacgtggtcctggtggttcacgtgaatatatggggagaggacctcctcctggaacaggtcggtgttttaactgtgggattgatggtcactgggcaagagactgcaaggctggtgactggaagaacaaatgttaccgctgtggggagagaggtcacatagaaagaaactgtcaaaacagcccaagaaatctcaggcgtgagagaagttattcatgctctccatcgccacgccgtggacgtggtcgcagtcggagctatagccggagccggagccggagccgcagttacagccggtctaggtccagatccctgtctggatctcccagggcacgcagagagcttgaaagatcaaggagtcttagttacagcaggagtcccaggcgatccatctccccagcagcaaatgaaaagaagcgcagccccacccctgatggtagccgtagtccaaggagtccacaggaccaggtgagcccaccacccaaggataatgctgagcgtaatggctcagatcacggtgacagcccccggggcagggagaacagcaggagcccgtctgatggctaccgtagccctgcagctgccaacgggcgcagcccaagcccaaggaacaatggaagccctagcccaatggacaacggtagccgaagtcctagggatggaaatggtgacggtggtagccgtggtggctcacgctcacctagaccgagcgagtctcctgaagcctga

SEQ ID NO: 2 - protein, 323 aa, Oryza sativa
MPRYDDRYGSTRLYVGRLSSRTRSRDLEYHFSRYGRIREVELKRDYAFIEFSDPRDAEEARYNLDGRDVDGSRILVEFAKGVPRGPGGSREYMGRGPPPGTGRCFNCGIDGHWARDCKAGDWKNKCYRCGERGHIERNCQNSPRNLRRERSYSCSPSPRRGRGRSRSYSRSRSRSRSYSRSRSRSLSGSPRARRELERSRSLSYSRSPRRSISPAANEKKRSPTPDGSRSPRSPQDQVSPPPKDNAERNGSDHGDSPRGRENSRSPSDGYRSPAAANGRSPSPRNNGSPSPMDNGSRSPRDGNGDGGSRGGSRSPRPSESPEA

SEQ ID NO: 3 - DNA, 450 bp, Saccharum officinarum
atgcctcgctatgatgaccgctatggaggcacgcgcttgtatgttggcagattggccccccgtactcgttcccgcgatttagaaaatctgttcggcagatatggaagaatacgagaagtggagttgaagcgcgactatgcatttattgagttcagtgatcatcgtgatgctgatgaggctcgataccaactagatggcagggatgttgatgggagtcgcattgttgttgagtttgccaaaggggtcccacgtggtccagctggctcacgtgaatatatgggaagaggccctccaccaggtacaggtcgttgtttcaactgtggaattgatggtcactgggcaagagactgtaaggctggtgactggaaaaacaaatgctaccgttgtggagaaagagggcatatagaaagaaattgccagaaacccaaagggtttcccccccctttttaa

SEQ ID NO: 4 - protein, 149 aa, Saccharum officinarum
MPRYDDRYGGTRLYVGRLAPRTRSRDLENLFGRYGRIREVELKRDYAFIEFSDHRDADEARYQLDGRDVDGSRIVVEFAKGVPRGPAGSREYMGRGPPPGTGRCFNCGIDGHWARDCKAGDWKNKCYRCGERGHIERNCQKPKGFPPPF

SEQ ID NO: 5 - DNA, 489 bp, Triticum aestivum
  misc_feature (309)..(309): n is a, c, g, or t
atgcctcgctacgatgagcgtgatcgttatggcggcaacacaaggctgtacgtgggtcgtcttccgtcgcgcacccgcacaagggaccttgaagacctcttcggcagatatgggagagtgcgacatgtggatatgaagcacgagtttgcatttgttgagtttagtgatcccagggatgctgatgaagcaaggtacaaccttgatggtcgtgactttgatggaagccgcatgattgttgagtttgctaaaggggttccgcgtggccaaggaggaggaggtgaccgtgaccgtggccgtggtggtgaccgngaatatatgggtcggggacctcctcctggttctggccgttgctttaactgtgggattgatgggcattgggctcgtgactgcaaagctggcgactggaaaaataggtgctatcgttgtggagatagtggccacatagaaagagattgccagaacagccctaagaacctcaagccgcagtag

SEQ ID NO: 6 - protein, 162 aa, Triticum aestivum
MPRYDERDRYGGNTRLYVGRLPSRTRTRDLEDLFGRYGRVRHVDMKHEFAFVEFSDPRDADEARYNLDGRDFDGSRMIVEFAKGVPRGQGGGGDRDRGRGGDREYMGRGPPPGSGRCFNCGIDGHWARDCKAGDWKNRCYRCGDSGHIERDCQNSPKNLKPQ

SEQ ID NO: 7 - DNA, 522 bp, Gossypium hirsutum
atgcctaggtatgatgatcgccgtggtggcactcgcctttatgtcggtcacttgtcttcaaggacaagatcacgtgatcttgaggacatgtttagcagatatggaagagtacgtgatgtggatatgaagcgcgactatgccttcgttgaattcagtgaccctagagatgctgatgatgcaagatattcattgaatggtcgagacctagacggatgccgtatcattgtggaatttgccaagggagtgccccgtggccctggtggatcacgtgattatgctggaagaggtcctactcctggatctgggcgctgcttcaattgtggaatcgatggccactgggctcgtgattgcaaagccggcgattggaagaataagtgttaccgctgtggggaacgaggccacatagaaagagattgtcaaaacagtccaaagaaactgagccgtaaaccacggagttactcgcgttcacccagtgaccgacgtggtcgaagcataagccgcagttacagccgaggggcgtag

SEQ ID NO: 8 - protein, 173 aa, Gossypium hirsutum
MPRYDDRRGGTRLYVGHLSSRTRSRDLEDMFSRYGRVRDVDMKRDYAFVEFSDPRDADDARYSLNGRDLDGCRIIVEFAKGVPRGPGGSRDYAGRGPTPGSGRCFNCGIDGHWARDCKAGDWKNKCYRCGERGHIERDCQNSPKKLSRKPRSYSRSPSDRRGRSISRSYSRGA

SEQ ID NO: 9 - DNA, 525 bp, Panicum virgatum
atgcctcgctatgatgatcgttatgggaacacacgcttgtatgttggcagactatcctcccgcactcgtacccgtgacctggaatatcttttcagcaaatatggaagaatacgagaagtggagttgaagcgcgactatgcatttattgaattcagcgatcctcgtgatgctgatgatgcacaatacaacctagatggcagggaagttgatggcagccgcattatcgttgagtttgctaaaggggttcctcgtggttctggcagctcacgcgagtacatgggaagagggcctccgccagggacaggtcgctgttttaactgtggaattgatggtcactgggcaagggattgcaaggctggtgactggaagaacaaatgctaccgttgtggagaaaggggccacatagaaagaaattgccagaacagtccaaggaatctgaggcgcgagagaagttattcacagtcaccatctccacgccgtggacgggggcgcagccggagctacagcagaagccgggagctatag

SEQ ID NO: 10 - protein, 174 aa, Panicum virgatum
MPRYDDRYGNTRLYVGRLSSRTRTRDLEYLFSKYGRIREVELKRDYAFIEFSDPRDADDAQYNLDGREVDGSRIIVEFAKGVPRGSGSSREYMGRGPPPGTGRCFNCGIDGHWARDCKAGDWKNKCYRCGERGHIERNCQNSPRNLRRERSYSQSPSPRRGRGRSRSYSRSREL

SEQ ID NO: 11 - DNA, 528 bp, Saccharum hybrid cultivar
atgcctcgctatgatgatcgctatgggaatacacgcttgtatgttggaagattggctccccgcacccgttcccgcgacctagaatatcttttcagcaaatatggaagaatacgtgaagtggagttgaagcgcgactatgcattcattgaattcagcgacccccaagatgctgatgatgcgcagtacaacctagatggcagggaagttgatggaagccggattattgttgaatttgctaaaggggttcctcgtggttctagtggttcacgtgaatatatgggaagaggacctccaccaggaacaggtcgttgttttaactgtggaattgatggtcactgggcaagagactgcaaggctggtgactggaagaacaaaatgttaccgtgtggcgaaaggggccatatagaaagaaattgccagaacagtccaaggaatctcaggcgtgagagaagctattcacgttctccatccccacgccgtggacggggcccgcagcccggagctacaagcagaagcccggagctatag

SEQ ID NO: 12 - protein, 175 aa, Saccharum hybrid cultivar
MPRYDDRYGNTRLYVGRLAPRTRSRDLEYLFSKYGRIREVELKRDYAFIEFSDPQDADDAQYNLDGREVDGSRIIVEFAKGVPRGSSGSREYMGRGPPPGTGRCFNCGIDGHWARDCKAGDWKNKMLPCGERGHIERNCQNSPRNLRRERSYSRSPSPRRGRGPQPGATSRSPEL

SEQ ID NO: 13 - DNA, 531 bp, Glycine max
atgcctcgctatgatgataaatacggcaatacccgcctctatgtgggacacttgtcttcgaggactcgttcccgtgatctggagcgtgcctttagcagatatggaagagttcgaggtgtggatatgaagaatgatttcgcttttgttgattttagtgatcctcgagatgctgatgatgcaagatataacctggatggtcgggatgttgatggaagtcggattattgtggaatttgcaaaaggggctcctcgtgggtcccgggaatatttggggcgaggtcctcctcctggctctggacgctgcttcaattgtggccttgatggccattgggcacgggattgcaaagctggggattggaagaataagtgttaccgctgtggggagagaggacatatagaaaggaactgcaagaacagccccaaaaaattgaggcgaggacggagttattcacgctcaccagtcaggtcacgttcacctcatcgcggcagaagccgtgatcgcagttacagccgagatcgcagctacaggtag

SEQ ID NO: 14 - protein, 176 aa, Glycine max
MPRYDDKYGNTRLYVGHLSSRTRSRDLERAFSRYGRVRGVDMKNDFAFVDFSDPRDADDARYNLDGRDVDGSRIIVEFAKGAPRGSREYLGRGPPPGSGRCFNCGLDGHWARDCKAGDWKNKCYRCGERGHIERNCKNSPKKLRRGRSYSRSPVRSRSPHRGRSRDRSYSRDRSYR

SEQ ID NO: 15 - DNA, 537 bp, Glycine max
atgcctcgctatgatgataaatacggcaatacccgcctctatgtgggacacttgtcttcgaggactcgttcccgtgatctggagcgtgcctttagcagatatggaagagttcgaggtgtggatatgaagaatgatttcgcttttgttgattttagtgatcctcgagatgctgatgatgcaagatataacctggatggtcgggatgttgatggaagtcggattattgtggaatttgcaaaaggggctcctcgtgggtcccgggaatatttggggcgaggtcctcctcctggctctggacgctgcttcaattgtggccttgatggccattgggcacgggattgcaaagctggggattggaagaataagtgttaccgctgtggggagagaggacatatagaaaggaactgcaagaacagccccaaaaaattgagcaccaggcgaggacggagttattcacgctcaccagtcaggtcacgttcacctcatcgcggcagaagccgtgatcgcagttacagccgagatcgcagctacaggtag

SEQ ID NO: 16 - protein, 178 aa, Glycine max
MPRYDDKYGNTRLYVGHLSSRTRSRDLERAFSRYGRVRGVDMKNDFAFVDFSDPRDADDARYNLDGRDVDGSRIIVEFAKGAPRGSREYLGRGPPPGSGRCFNCGLDGHWARDCKAGDWKNKCYRCGERGHIERNCKNSPKKLSTRRGRSYSRSPVRSRSPHRGRSRDRSYSRDRSYR

SEQ ID NO: 17 - DNA, 546 bp, Populus trichocarpa
atgccgcgatatgatgatcgatatgccagtacgcgtctctatgttggacacctggctgctaggacacgatcacgggatctggaacatcttttcagcaaatatgggcgagtacgagatgtggatatgaagcgtgactatgcatttgttgaatttagtgatcccagagatgctgatgatgcaaggcattacttagatggcaaggagtttgatggaagtcgtatcattgtggaatttgcaaagggggtacctcgtggttctcgagaatatttgggcagaggtcctcctccaggatctggacgctgctttaattgtggcattgatggccactgggctcgagattgcaaagctggagactggaagaacaagtgttatcgttgtggggaaagaggtcatatagagagaaactgcaagaacagtcccaagaaactcacgcggggaaagagttactctcgatcaccaggtagatcacgctctcctcaccgtggcagaagccgcagcccaagttatagccgaggtcgaagctacaggtctgtggtttttctttga

SEQ ID NO: 18 - protein, 181 aa, Populus trichocarpa
MPRYDDRYASTRLYVGHLAARTRSRDLEHLFSKYGRVRDVDMKRDYAFVEFSDPRDADDARHYLDGKEFDGSRIIVEFAKGVPRGSREYLGRGPPPGSGRCFNCGIDGHWARDCKAGDWKNKCYRCGERGHIERNCKNSPKKLTRGKSYSRSPGRSRSPHRGRSRSPSYSRGRSYRSVVFL

SEQ ID NO: 19 - DNA, 555 bp, Glycine soja
atgcctcgctatgatgataaatacggcaatacccgcctctatgtgggacacttgtcttcgaggactcgttcccgtgatctggagcgtgcctttagcagatatggaagagttcgaggtgtggatatgaagaatgatttcgcttttgttgatgttagtgatcctcgagatgctgatgatgcaagatataacctggatggtcgggatgttgatggaagtcggattattgtggaatttgcaaaaggggctcctcgtgggtcccgggaatattaggggcgaggtcctcctcctggctctggacgctgcttcaattgtggccttgatggccattgggcacgggattgcaaagctggggattggaagaataagtgttaccgctgtggggagagaggacatatagaaaggaactgcaagaacagccccaaaaaatggaggcgaggacagagttattcacgctcaccagtcaggtcacgtgcacctcatcgcggcagagccgtgatcgcagtacagccgagatcgagctacagtcgatcacgaatccctgtgagaagagaagaa

SEQ ID NO: 20 - protein, 184 aa, Glycine soja
MPRYDDKYGNTRLYVGHLSSRTRSRDLERAFSRYGRVRGVDMKNDFAFVDVSDPRDADDARYNLDGRDVDGSRIIVEFAKGAPRGSREYGRGPPPGSGRCFNCGLDGHWARDCKAGDWKNKCYRCGERGHIERNCKNSPKKWRRGQSYSRSPVRSRAPHRGRAVIAVQPRSSYSRSRIPVRREE

SEQ ID NO: 21 - DNA, 582 bp, Nicotiana tabacum
atgcctcgttatgatgatcggtcgggaaatagcacccgtctctatgtgggccacttgtcttcacggacccgctcacgtgatctggagcgtgtattcagtaaatatgggagagtacgagatgtggatatgaagcacgactatgccttcgtagaatttagtgatccacgagatgctgatgatgcaagatactatttagacggccgggacgttgatggccgccgcataattgtggaatttgccaagggagtgccacgtggacctggtggttcgcgtgagtatcttggcaaaggacctgctcctggctcaggccgctgcttcaactgtggccttgaaggtcactgggctcgagattgcaaagctggggattggaagaacaaatgttatcggtgtggagaaagaggtcatatagaaaaaaaatgcccaaatagtcctaaaaaactcagtcgacgggatcggagctactcacggtcacctgtcaggtcaaggtcacgttcacgttctcctcgtcgtcgaagttacagcagaagccgcagctatagtccatcaagatctcctcctccaagagaggaaaagctgacctag

SEQ ID NO: 22 - protein, 193 aa, Nicotiana tabacum
MPRYDDRSGNSTRLYVGHLSSRTRSRDLERVFSKYGRVRDVDMKHDYAFVEFSDPRDADDARYYLDGRDVDGRRIIVEFAKGVPRGPGGSREYLGKGPAPGSGRCFNCGLEGHWARDCKAGDWKNKCYRCGERGHIEKKCPNSPKKLSRRDRSYSRSPVRSRSRSRSPRRRSYSRSRSYSPSRSPPPREEKLT

SEQ ID NO: 23 - DNA, 594 bp, Allium cepa
atgcctcgttatgatgatcgttatggcaacacaaggttgtacattgggcatttatcatcaaggacccgttcacgtgatcttgaagacttgtttggccgatatggcagagtacgagatgtggatatgaagcgcgactatgcatttgttgaattcagcgatcctagggatgcagatgatgcaaggtacagcttggatggtagagaatttgatggaagtcgtcttatcgtggaatttgcaaaagggcatccacgtggtggaggtggaggtgggtcccgtgaatatctaggaaggggtccagaacctggttctggtcgttgcttcaattgtggcattgatgggcactgggctagagactgcaaagccggtgactggaaaaacaagtgctatcgctgtggggagcgtggtcatatagaaaggaactgtcaaaatagcccaaagagtctcaagcgtgggagaagttattctaggtcaccgtctcctcgcccgaggcgtagtaggagaagcagaagcagaagcttcagccgtagtcgaagttacagcccgatcgagatcccctgctccaaggaggagagagcgaagcatagacagagatga

SEQ ID NO: 24 - protein, 197 aa, Allium cepa
MPRYDDRYGNTRLYIGHLSSRTRSRDLEDLFGRYGRVRDVDMKRDYAFVEFSDPRDADDARYSLDGREFDGSRLIVEFAKGHPRGGGGGGSREYLGRGPEPGSGRCFNCGIDGHWARDCKAGDWKNKCYRCGERGHIERNCQNSPKSLKRGRSYSRSPSPRPRRSRRSRSRSFSRSRSYSPIEIPCSKEERAKHRQR

SEQ ID NO: 25 - DNA, 597 bp, Physcomitrella patens
atgtctcggtatgatgatcgttacagagggagtcacaggcgtgacgatagaggtggaggtggaggcggagggggttatcgtggcggtggtgggaggggtggggatgctgtgcccgatgctggggctactcgtttatatgtcggccgtctttctactcgtactagaggtcgagatttggaagaccttttcgcgaagtatgggagagttcgcgacgtggatgtgaagcacgactttgcctttgttgaatttgctgatgctcgagatgcggatgatgcaagacattatgtgaacggaaaagacttcgatggcaacaggctcattgtagagttcgcgaggaggggaccccgtggtgccccaggtggtgctcgagaatacctcggcagaggtccacctcctggcactggccgttgttataattgtggcaacgatggccattgggcaagagattgcaaagctggtgattggagggacaagtgttatcgatgcggacagcgggggcacattgagcgcaactgccgcaacagccccaggccaactagcagtccttctcttttccgctctcgctctcctagaggacaaaagagatcctcccggtaa

SEQ ID NO: 26 - protein, 198 aa, Physcomitrella patens
MSRYDDRYRGSHRRDDRGGGGGGGGYRGGGGRGGDAVPDAGATRLYVGRLSTRTRGRDLEDLFAKYGRVRDVDVKHDFAFVEFADARDADDARHYVNGKDFDGNRLIVEFARRGPRGAPGGAREYLGRGPPPGTGRCYNCGNDGHWARDCKAGDWRDKCYRCGQRGHIERNCRNSPRPTSSPSLFRSRSPRGQKRSSR

SEQ ID NO: 27 - DNA, 612 bp, Triticum turgidum
atgcctcgttatgatgatcgttatggaaacgcacgcttgtatgttggtagattgtcctcccgtactcgttcgcgcgacctagaatatcttttcagcaaatatggaagaatacgggaagtggaattgaagcgcgactatgcattcattgaatacagtgatcctcgtgatgctgatgaggcccgatacaacctagatggcagggatgttgatgggagccgcattattgttgagtttgctaaaggggttccacgtggttctggtggttcacgagaacgtgaatatgtgggaagagggcctcctccaggaacaggccgttgtttcaactgtggtattgatggtcattgggccagggactgcaaagctggtgactggaagaacaaatgctaccgctgtggagaaaggggccatattgaaagaaattgccagaatagcccgaggagtctcaggcgtgagagaagctattcacggtccccatctccacgtcgtggacgggctcgcagtcggagctacagcagaagccgtagttacagccgatctaggtccagatcctattctgaatctcccagagggcgccgcacagagcgtgatgagaggagatcaagggagcattag

SEQ ID NO: 28 - protein, 203 aa, Triticum turgidum
MPRYDDRYGNARLYVGRLSSRTRSRDLEYLFSKYGRIREVELKRDYAFIEYSDPRDADEARYNLDGRDVDGSRIIVEFAKGVPRGSGGSREREYVGRGPPPGTGRCFNCGIDGHWARDCKAGDWKNKCYRCGERGHIERNCQNSPRSLRRERSYSRSPSPRRGRARSRSYSRSRSYSRSRSRSYSESPRGRRTERDERRSREH

SEQ ID NO: 29 - DNA, 627 bp, Brassica rapa
atgcctcgatttgatgatcggtatggaaacactcgcctctacgttggccgcttgtcatctagaactcgtagcagggatcttgagcgtcttttcagcagatacggcagagtacgagatgttgatatgaagcgtgactatgcctttgttgaatttagcgatcctcgtgatgctgatgacgcaagatactacttagatggacgagacttcgatgggagtcgcatcactgttgaggcttccagaggggcacctcgtggttctcgggacagtggtagcagaggtccacctcctggttcgggtcgctgttttaactgtggtgttgatggtcattgggctagagactgcacagcaggtgactggaagaacaaatgttaccgctgtggtgaaagaggacacattgagagaaactgcaagaacagtcctagtcctaagaaggccaggcgtggtggaagctactccaggtcaccagttaaatcacgttctcctcgccgcagaagaagcccaagccgtagccgtagttacagtcgtggtcgtagctacagccgttcacgatcgccggtaagaagagagagaagcgttgaggatagatcacttagccccaaggcatggagcgatccgcatctcccatag

SEQ ID NO: 30 - protein, 208 aa, Brassica rapa
MPRFDDRYGNTRLYVGRLSSRTRSRDLERLFSRYGRVRDVDMKRDYAFVEFSDPRDADDARYYLDGRDFDGSRITVEASRGAPRGSRDSGSRGPPPGSGRCFNCGVDGHWARDCTAGDWKNKCYRCGERGHIERNCKNSPSPKKARRGGSYSRSPVKSRSPRRRRSPSRSRSYSRGRSYSRSRSPVRRERSVEDRSLSPKAWSDPHLP

SEQ ID NO: 31 - DNA, 627 bp, Oryza sativa
atgcctcgctatgatgaccgtgatcgctacgatgaccgttacggcggcaacacgaggctgtacgtaggtcgtctttcctcgcgcacccggacccgggaccttgaagaccttttcggcagatatgggagagtgcgatatgtggatatgaagcacgagtttgcatttgttgaatttagtgatgctcgggatgctgatgaggcaaggtacaacctggatggtcgggactttgatggaagccgcatgattgttgagtttgctaaaggggttccacgtggccctggaggatcacgtgaatatatgggcagaggaccaccacctggttctggccgctgctttaactgtgggattgatgggcactgggcccgtgactgcaaagctggagactggaaaaacagatgctatcggtgtggagacaggggccatatagaaagggactgccggaacagccctaagaatctcaagcgtggaagaagctactcaagatccccatcccctcgtcgtgggaggagccgtggtaggagctacagcaggagccgtagcaggagctacaggtatggaaaggaggatatcatttccttgatttcaacatgggaatctcttacttatcttatatgtgatcattattaa

SEQ ID NO: 32 - protein, 208 aa, Oryza sativa
MPRYDDRDRYDDRYGGNTRLYVGRLSSRTRTRDLEDLFGRYGRVRYVDMKHEFAFVEFSDARDADEARYNLDGRDFDGSRMIVEFAKGVPRGPGGSREYMGRGPPPGSGRCFNCGIDGHWARDCKAGDWKNRCYRCGDRGHIERDCRNSPKNLKRGRSYSRSPSPRRGRSRGRSYSRSRSRSYRYGKEDIISLISTWESLTYLICDHY

SEQ ID NO: 33 - DNA, 654 bp, Triticum aestivum
atgcctcgttatgatgatcgttatggaaacgcacgcttgtatgttggtagattgtcctcccgtactcgttcgcgcgacctagaatatcttttcagcaaatatggaagaatacgggaagtggaattgaagcgcgactatgcattcattgaatacagtgatcctcgtgatgctgatgaggcccgatacaacctagatggcagggatgttgatgggagccgcattattgttgagtttgctaaaggggttccacgtggttctggtggttcacgagaacgtgaatatgtgggaagagggcctcctccaggaacaggccgttgtttcaactgtggtattgatggtcattgggccagggactgcaaagctggtgactggaagaacaaatgctaccgctgtggagaaaggggccatatagaaagaaattgccagaatagcccgaggagtctcaggcgtgagagaagctattcacggtccccatctccacgtcgtggacgggctcgcagtcggagctacagcagaagccgtagttacagccgatctaggtccagatcctattctgaatctcccagagggcgccgcacagagcgtgatgagaggagatcaaggagcattagctacagcaggagccccaggcgatcactctccccaggaggctaa

SEQ ID NO: 34 - protein, 217 aa, Triticum aestivum
MPRYDDRYGNARLYVGRLSSRTRSRDLEYLFSKYGRIREVELKRDYAFIEYSDPRDADEARYNLDGRDVDGSRIIVEFAKGVPRGSGGSREREYVGRGPPPGTGRCFNCGIDGHWARDCKAGDWKNKCYRCGERGHIERNCQNSPRSLRRERSYSRSPSPRRGRARSRSYSRSRSYSRSRSRSYSESPRGRRTERDERRSRSISYSRSPRRSLSPGG

SEQ ID NO: 35 - DNA, 681 bp, Triticum aestivum
atgcctcgctacgatgagcgtgatcgttatggcggcaacacaaggctgtacgtgggtcgtcttccctcgcgcacccgcacaagggaccttgaagacctcttcggcagatatgggagagtgcgacatgtggatatgaagcatgagtttgcatttgttgagtttagtgatcccagggatgctgatgaagcaaggtacaatcttgatggtcgtgactttgatggaagccgcatgattgttgagtttgctaaaggggttccgcgtggccaaggaggaggaggtgaccgtgaccgtggccgtggcggtgaccgtgaatatatgggtcggggacctcctcctggttctggccgttgctttaactgtgggattgatgggcattgggctcgtgactgcaaagctggcgactggaaaaataggtgctatcgttgtggagatagtggccacatagaaagggattgccagaacagccctaagaacctcaagcgtggaaagagttactccagatctccatctcctcgccgtggaagggtgcgtgataggagctacagcaggagcccaatgaaggctgacagccctaataacatgagcccagctgcaaatggtcgtagcccgagccccagggacggcgaagacaatggcaaccaccgtgcacccagtggaagtgcatcacccggtggtggttga

SEQ ID NO: 36 - protein, 226 aa, Triticum aestivum
MPRYDERDRYGGNTRLYVGRLPSRTRTRDLEDLFGRYGRVRHVDMKHEFAFVEFSDPRDADEARYNLDGRDFDGSRMIVEFAKGVPRGQGGGGDRDRGRGGDREYMGRGPPPGSGRCFNCGIDGHWARDCKAGDWKNRCYRCGDSGHIERDCQNSPKNLKRGKSYSRSPSPRRGRVRDRSYSRSPMKADSPNNMSPAANGRSPSPRDGEDNGNHRAPSGSASPGGG

SEQ ID NO: 37 - DNA, 684 bp, Helianthus annuus
atgccgcgtcatgatgatcgctatggtagtactacacgtctctatgttggccacttggcttcacgaacccgatcgcgtgacttagaggacatattcagtcgatatggaagaatacgtcatgtggatatgaagcgtgattatgccttcgtggaattcagtgacccacgcgatgctgatgatgcacgatacagcttaaatggtcgtgatgtggatggaagccgtattgtggtggaattttcaaagggggttccacgaggtggtggcggtggtccctcaggtgggtcccgtgaatatcttggcagaggtcctccaccagggtcagggcgttgcttcaattgtggacttgatggccattgggctcgagattgcaaagctggcgactggaaaaacaaatgctaccgttgtggtgagcgaggccatatagaaaggcattgtcaaaacagccccaagaaagctgctcaaagcaggcgtggacgaagttactcgagaactccatctccagctcgacgtggtagaagccgcagtcgtagttatagcaggggtcgcagctacagccgatcaagatcaccttcaaggcgggagaggagcattgaccgtgcagatagaaagaagaggagtccaaggagacacgaggcttcaccatcaccatcccaaagggaggaaacgcagcccatcacctgctga

SEQ ID NO: 38 - protein, 227 aa, Helianthus annuus
MPRHDDRYGSTTRLYVGHLASRTRSRDLEDIFSRYGRIRHVDMKRDYAFVEFSDPRDADDARYSLNGRDVDGSRIVVEFSKGVPRGGGGGPSGGSREYLGRGPPPGSGRCFNCGLDGHWARDCKAGDWKNKCYRCGERGHIERHCQNSPKKAAQSRRGRSYSRTPSPARRGRSRSRSYSRGRSYSRSRSPSRRERSIDRADRKKRSPRRHEASPSPSQREETQPITC

SEQ ID NO: 39 - DNA, 684 bp, Prunus persica
atgcctcgacatgatgaccgccatggtggttcacggctctatgttggtcgcttgtcatcacggacaagatcacgcgaacttgaagatgtatttagcagatatggaagagtacgtgatgtggatatgaagcgcgactttgcctttgttgaatttagtgaccctcgggatgctgatgatgcaagatatagcctgaacggtcgggatgttgatgggagccgtctaattgtggaatttgcaaggggggcaccacggggtcctggcggatctcgtgagtatcttgggagagggcctccccctggatcaggacgctgtttcaattgtggacttgatgggcactgggctcgagattgcaaagctggggactggaagaataagtgttatcgatgtggagaacgagggcacattgaaagaaactgtcagaatagtccaaagaaaaccaaagggcgtagtcattcacgttcaccaagtccaaggcggggcagaagtcgaagccgtagttacagcaggggtcatagttacagtcgatccagatcacctgtgaggagagaaaggagtttggagagaagatcaaggagtcctcaagacagccggagccctaagaggcgtagggcttcaccaccaccatccaagggggaggaagcacgatcgtacacccgaagggaggagcccacgagtgaggggtag

SEQ ID NO: 40 - protein, 227 aa, Prunus persica
MPRHDDRHGGSRLYVGRLSSRTRSRELEDVFSRYGRVRDVDMKRDFAFVEFSDPRDADDARYSLNGRDVDGSRLIVEFARGAPRGPGGSREYLGRGPPPGSGRCFNCGLDGHWARDCKAGDWKNKCYRCGERGHIERNCQNSPKKTKGRSHSRSPSPRRGRSRSRSYSRGHSYSRSRSPVRRERSLERRSRSPQDSRSPKRRRASPPPSKGEEARSYTRREEPTSEG

SEQ ID NO: 41 - DNA, 702 bp, Euphorbia esula
atgccgcgatatgatgatcgttatgctaatactcgtctctatgttggacatcttgcctctcgtacaagatcacgagatcttgagtatcttttcagcaaatacggaagagtacgagatgtggatatgaagcgtgactatgcatttgttgaatttagtgatcctcgagatgctgatgatgcaagataccacctggatggcaaggattttgacgggagccgtataattgtggaatttgccaaaggggtacctcgcggttcccgggaatatttgggaaggggtcctcctccaggatctggacgttgctttaattgtggaatagatggtcactgggctcgtgattgcaaagctggggactggaagaataagtgttatcgctgtggagaaagaggccatattgagagaaactgcaagaacagtccaaagaaactcaaaggccggagttactccagatctcctgctaggtcaaggtcacactcaccacggcgaggcagaagccgtagcccaagctacagcagaggtcgcagctacagccggtcaagatctccagcaccaaagagagagagaagcattgagcgtgatgacaggaggaggtccctgagccctgagcctaagaatggggtgctctcaaagagcaggaagcgcagcccaacacctgatgtatggcagcccaagatcttctcccaagtcccggaaagtggatga

SEQ ID NO: 42 - protein, 233 aa, Euphorbia esula
MPRYDDRYANTRLYVGHLASRTRSRDLEYLFSKYGRVRDVDMKRDYAFVEFSDPRDADDARYHLDGKDFDGSRIIVEFAKGVPRGSREYLGRGPPPGSGRCFNCGIDGHWARDCKAGDWKNKCYRCGERGHIERNCKNSPKKLKGRSYSRSPARSRSHSPRRGRSRSPSYSRGRSYSRSRSPAPKRERSIERDDRRRSLSPEPKNGVLSKSRKRSPTPDVWQPKIFSQVPESG

SEQ ID NO: 43 - DNA, 711 bp, Brassica napus
atgcctcgatttgatgatcgatatggaaacactcgcctctacgtcggccgcttgtcatctagaactcgcagcagggatcttgagcgtcttttcagcagatacggaagagtacgagatgttgatatgaagcgtgactatgcctttgttgaatttagcgatcctcgtgatgctgatgacgcaagatactatttagatggacgagacttcgatgggagtcgcatcactgttgaggcttcaagaggggcacctcgtggttctcgggacagtggtagcagaggtccccctcctggttcgggtcgctgttttaactgcggtgttgatggtcattgggctagagactgcacagcaggtgactggaagaacaaatgttaccgctgtggtgaaagaggacacattgagagaaactgcaagaacagtcctagtcctaagaaggccaggcgtggtggaagctactccaggtcaccagttaaatcacgctcccctcgccgcagaagaagcccaagccggagccgtagttacagtcgtggtcgtagctacagccgttcacgatcgccagtgagaagagagagaagcgttgaggatagatcacttagtcctaaggcaaatggagcgatctgtatctcccagaggcaaagaccaaagcatgagtccagagcgaagggtcgtagatgcaagcccaaaacgggaaaagcaagaaggatcagactatga

SEQ ID NO: 44 - protein, 236 aa, Brassica napus
MPRFDDRYGNTRLYVGRLSSRTRSRDLERLFSRYGRVRDVDMKRDYAFVEFSDPRDADDARYYLDGRDFDGSRITVEASRGAPRGSRDSGSRGPPPGSGRCFNCGVDGHWARDCTAGDWKNKCYRCGERGHIERNCKNSPSPKKARRGGSYSRSPVKSRSPRRRRSPSRSRSYSRGRSYSRSRSPVRRERSVEDRSLSPKANGAICISQRQRPKHESRAKGRRCKPKTGKARRIRL

SEQ ID NO: 45 - DNA, 717 bp, Saccharum officinarum
  misc_feature (590)..(591): n is a, c, g, or t
atgcctcgctatgatgatcgctatgggaatacacgcttgtatgttggaagattggctccccgcacccgttcccgcgacctagaatatcttttcagcaaatatggaagaatacgtgaagtggagttgaagcgcgactatgcattcattgaattcagcgacccccaagatgctgatgatgcgcagtacaacctagatggcagggaagttgatggaagccggattattgttgaatttgctaaaggggttcctcgtggttctagtggttcacgtgaatatatgggaagaggagctccaccaggaacaggtcgttgttttaactgtggaattgatggtcactgggcaagagactgctacgctggtgactggaagaacaaatgttaccgctgtggcgaaaggggccatatagaaagaaattgccagaacagtccaatgaatctcaggcgtgagagaagctattcacgttctccatccccacgccgtggacggggccgccagcggagctacagcagaagccggagctataggtatgctcaggaaaggaaaccctcgtgttatttctctataagctctttggattcgttaggtgttanntattctttgttaatccttcatttctggttggtcaaccagcttgtgttaaccatccttctattacaatcaggcgaatccagtccccatctggatttccgaaggggtggacgccgtgaccgtgtatga

SEQ ID NO: 46 - protein, 238 aa, Saccharum officinarum
  misc_feature (197)..(197): Xaa can be any naturally occurring amino acid
MPRYDDRYGNTRLYVGRLAPRTRSRDLEYLFSKYGRIREVELKRDYAFIEFSDPQDADDAQYNLDGREVDGSRIIVEFAKGVPRGSSGSREYMGRGAPPGTGRCFNCGIDGHWARDCYAGDWKNKCYRCGERGHIERNCQNSPMNLRRERSYSRSPSPRRGRGRQRSYSRSRSYRYAQERKPSCYFSISSLDSLGVXYSLLILHFWLVNQLVLTILLLQSGESSPHLDFRRGGRRDRV

SEQ ID NO: 47 - DNA, 717 bp, Solanum tuberosum
atgcctcgttatgatgatcggatgggaaatagcactcgtctctatgtgggacacttgtcttcacggacccgttcacgtgatctggagcgtgcgttcagtaaatatgggagagtacgggatgtggacatgaagcacgactatgccttcgtagaatttagtgatcctcgagatgctgatgatgcaagatactatttagatggccgtgacattgatggacgccgcataattgttgaatttgccaagggagtgccacgtggaccaggcggttcgcgcgagtatcttggcaaaggacccgctcctgggtcaggccgctgcttcaactgtggccttgaaggtcactgggctcgagattgcaaagctggggattggaagaacaagtgttatcgatgtggagaaagaggtcacatagaaaggaaatgcccaaatagtcctaaaaaagtcagagacgcagctactcacggtcgcctgttaggtcaaagtcacgctcacgttcacgttctcctcgtcgaagttatagcagaagtcgcagctatagtcaatcaagatccccgccaccaaagagagaacaagtggaccaggtcaagcgatcaagaagctacagtaggagcccggagccaaggaaggctagtccaagccctccacccaagactaggaagcgcagcccaacacctgaagagggaagcccgatggaagcaaagagccctccttcaccaatga

SEQ ID NO: 48 - protein, 238 aa, Solanum tuberosum
MPRYDDRMGNSTRLYVGHLSSRTRSRDLERAFSKYGRVRDVDMKHDYAFVEFSDPRDADDARYYLDGRDIDGRRIIVEFAKGVPRGPGGSREYLGKGPAPGSGRCFNCGLEGHWARDCKAGDWKNKCYRCGERGHIERKCPNSPKKVRDAATHGRLLGQSHAHVHVLLVEVIAEVAAIVNQDPRHQRENKWTRSSDQEATVGARSQGRLVQALHPRLGSAAQHLKREARWKQRALLHQ

SEQ ID NO: 49 - DNA, 723 bp, Lactuca sativa
atgcctcgttatgatgatcgccatggcagcactcgtctctatgttggccacctggcttcacgtacaagatcgcgtgatttggaagacatttttagcagatatggaagaatacgcgatgtggatatgaagcgcggctttgcctttgtggaattcagcgatgcaagagatgctgatgatgcaagatatagcttaaatggtcgtgatgttgatggaagccgaatagtggtggagtttgctaaaggggctccacgtggcggtggcggcggcgggcgtgatggtggtggtcgtgacggtggtggccgtgatggtggttctcgtgagtttcttgggagaggtcctccaccggggtcagggcggtgctttaattgtgggcttgatgggcattgggctcgtgactgtaaagctggtgattggaagaacaaatgctatcgatgtggtgaacgtggtcatatagaaaggaattgtcaaaatagcccaaagaaagtcaatgctgatagcaggcgtggaagaagttactcgcggaccccatcgccacctaggcgtggaagaagccgcagtcgtagttttagcaggagtcgcagctacagccaatcaaggtcacctgtagagcgggagagggagagagagagagaaagagagagtattattaataactttgaatcatgttgtctttctgcaaactttatgcaagtacctaaatggcagtcgtgcctctatttgtag

SEQ ID NO: 50 - protein, 240 aa, Lactuca sativa
MPRYDDRHGSTRLYVGHLASRTRSRDLEDIFSRYGRIRDVDMKRGFAFVEFSDARDADDARYSLNGRDVDGSRIVVEFAKGAPRGGGGGGRDGGGRDGGGRDGGSREFLGRGPPPGSGRCFNCGLDGHWARDCKAGDWKNKCYRCGERGHIERNCQNSPKKVNADSRRGRSYSRTPSPPRRGRSRSRSFSRSRSYSQSRSPVERERERERERESIINNFESCCLSANFMQVPKWQSCLYL

SEQ ID NO: 51 - DNA, 726 bp, Citrus sinensis
atgcctcgttatgatgaccggtacggtggtacgcgtctctatgttggccgcttggcttcacggacaagatcacgcgatcttgaggagatcttcagcagatatgggagaattcgcgatgtggatatgaagcgtgacttcgcctttgttgaatttagcgaccctcgcgatgctgacgatgcaagatatagcttaaatggtcgggatgttgatggaagccgtatcattgtggaatttgcaagaggggggccacgtggtcctggtggatctcgtgagtatcttggtcgaggccctcctcctggatctgggcgctgcttcaattgtgggattgatggccattgggctcgagactgcaaggctggagactggaagaataagtgttatcgctgtggtgaacgaggccacatagaacgaaattgtcaaaacagtccaaagaagttaaggaggcctcggagttattcacgttctccaagtcctcgtcgtggtagaagcaggagccgtagttacagtagaggccgcagcgacagccgatcacgatcgcctgtaaagagagataggagtgttgaacgttttgagagaagaacaaggagcccccgagacagtaggagccctaagcgtcgcagaaattcaccaccatcatctaaaggtaggaagcgtagtccaaccccagatgaaagaagtccacaagatcaacgtagcccatccccaagggacccggaggcaggctaa

SEQ ID NO: 52 - protein, 241 aa, Citrus sinensis
MPRYDDRYGGTRLYVGRLASRTRSRDLEEIFSRYGRIRDVDMKRDFAFVEFSDPRDADDARYSLNGRDVDGSRIIVEFARGGPRGPGGSREYLGRGPPPGSGRCFNCGIDGHWARDCKAGDWKNKCYRCGERGHIERNCQNSPKKLRRPRSYSRSPSPRRGRSRSRSYSRGRSDSRSRSPVKRDRSVERFERRTRSPRDSRSPKRRRNSPPSSKGRKRSPTPDERSPQDQRSPSPRDPEAG

SEQ ID NO: 53 - DNA, 726 bp, Gossypium hirsutum
atgcctaggtatgatgaccgacgcggtggcactcgtttgtatgttggtcatttgtcttcaaggacaagatcacgtgatctagaggacatgtttagcagatatgggagagtacgtgatgtggatatgaagcgtgactatgcatttgttgaattcagtgatcctagagatgccgatgatgcaagatatgcattgaatggtcgagacatggatggaagccggatgattgttgaatttgccaaaggagtgccccgtggttcaggtggatctcgagattaccctggaagaggccccactcctgggtcaggacgctgcttcaactgtggaattgatggtcattgggctcgtgattgcaaagccggggattggaagaataagtgttaccgctgtggagaacgaggccatatagaaagaaattgtcaaaacagtccaaagaaactaagccgcagaccacgcagttactctcgctcacctagcccctaccgtggtagaagcagaagccgcagttacagcaggggacgcagcgacagtagatcaagatcacctgtgaagagagaccgaagttacgagcgcgaggatagaatatcaaggagccctaagcgccacaagggttctccatcaccatctcaagggaggaagcatagtccagcacccaatgaaagaaggcccccagagggggggcggtccttcccccaaggactgcagggctgcaaatggttcggattatag

SEQ ID NO: 54 - protein, 241 aa, Gossypium hirsutum
MPRYDDRRGGTRLYVGHLSSRTRSRDLEDMFSRYGRVRDVDMKRDYAFVEFSDPRDADDARYALNGRDMDGSRMIVEFAKGVPRGSGGSRDYPGRGPTPGSGRCFNCGIDGHWARDCKAGDWKNKCYRCGERGHIERNCQNSPKKLSRRPRSYSRSPSPYRGRSRSRSYSRGRSDSRSRSPVKRDRSYEREDRISRSPKRHKGSPSPSQGRKHSPAPNERRPPEGGRSFPQGLQGCKWFGL

SEQ ID NO: 55 - DNA, 735 bp, Lactuca sativa
atgcctcgctatgatgatcgccatggcagcactcgtctctatgttggccacctggcttcacgtacaagatcgcgtgatttggaagacatttttagcagatatggaagaatacgcgatgtggatatgaagcgcgactttgcctttgtggaattcagcgatgcaagagatgctgatgatgcaagatatagcttaaatggtcgtgatgttgatggaagccgaatagtggtggagtttgctaaaggggctccacgtggcggtggcggcggcgggcgtgatggtggtggtcgtgacggtggtggccgtgatggtggttctcgtgagtttcttgggagaggtcctccaccggggtcagggcggtgctttaattgtgggcttgatgggcattgggctcgtgactgtaaagctggtgattggaagaacaaatgctatcgatgtggtgaacgtggtcatatagaaaggaattgtcaaaatagcccaaagaaagtcaatgctgatagcaggcgtggaagaagttactcgcggaccccatcgccacctaggcgtggaagaagccgcagtcgtagttttagcaggagtcgcagctacagccaatcaaggtcacctgtaaagcgggagagggagagagagaggagcattgaacgtgcagaaagaagatcgagaagcccaaggagacacagggggggcttcaccaccaccatcgaaagggaggaagcgcaacaccagcccatcgcctga

SEQ ID NO: 56 - protein, 244 aa, Lactuca sativa
MPRYDDRHGSTRLYVGHLASRTRSRDLEDIFSRYGRIRDVDMKRDFAFVEFSDARDADDARYSLNGRDVDGSRIVVEFAKGAPRGGGGGGRDGGGRDGGGRDGGSREFLGRGPPPGSGRCFNCGLDGHWARDCKAGDWKNKCYRCGERGHIERNCQNSPKKVNADSRRGRSYSRTPSPPRRGRSRSRSFSRSRSYSQSRSPVKRERERERSIERAERRSRSPRRHRGGFTTTIEREEAQHQPIA

SEQ ID NO: 57 - DNA, 753 bp, Glycine max
atgcctcgctatgatgataaatacggcaatacccgcctctatgtgggacacttgtcttcgaggactcgttcccgtgatctggagcgtgcctttagcagatatggaagagttcgaggtgtggatatgaagaatgatttcgcttttgttgattttagtgatcctcgagatgctgatgatgcaagatataacctggatggtcgggatgttgatggaagtcggattattgtggaatttgcaaaaggggctcctcgtgggtcccgggaatatttggggcgaggtcctcctcctggctctggacgctgcttcaattgtggccttgatggccattgggcacgggattgcaaagctggggattggaagaataagtgttaccgctgtggggagagaggacatatagaaaggaactgcaagaacagccccaaaaaattgagcaccaggcgaggacggagttattcacgctcaccagtcaggtcacgttcacctcatcgcggcagaagccgtgatcgcagttacagccgagatcgcagctacagtcgatcacgatcccctgtcagaagagaagaaagccctgttcgggaagataggtcacaaagccctgatcacaaaaatagtcctcagccctccaagacaaggaagcatagtccatcacctgaccgtagcccacagaaaagaggtgacacatctcccgacaatgataggttgagtagaagccctgcaagggaccctgaagataggggcagcgagtcaccttaa

SEQ ID NO: 58 - protein, 250 aa, Glycine max
MPRYDDKYGNTRLYVGHLSSRTRSRDLERAFSRYGRVRGVDMKNDFAFVDFSDPRDADDARYNLDGRDVDGSRIIVEFAKGAPRGSREYLGRGPPPGSGRCFNCGLDGHWARDCKAGDWKNKCYRCGERGHIERNCKNSPKKLSTRRGRSYSRSPVRSRSPHRGRSRDRSYSRDRSYSRSRSPVRREESPVREDRSQSPDHKNSPQPSKTRKHSPSPDRSPQKRGDTSPDNDRLSRSPARDPEDRGSESP

SEQ ID NO: 59 - DNA, 765 bp, Panicum virgatum
atgcctcgatacgatgaccgctatgattacgatgatcgatacgaccactatggtcgacatggtggtaacaccaagttgtacgtgggtcagatttctcctcatactcagatacatgatcttgaggaccttttcagcaaatatgggagactgcggaaagtggatctgaagagggactttggctttgttgagtttagtgatcctcgggatgccgatgacgcaaggtatgatcttgatggccgaaaatttgatgggagttgtatcgttgttgagtttgcaagaggggtcccgcgtggtccaggaggtgtccgccaatatggcagaggacctcctggccgctgctataactgtgggatggatgggcactgggttcgtgattgcaaagctagtgactggcgggataggtgctaccgctgtggagaaatgggccatctagaaagaaactgccagaacagtccaaaggatctgaagcgagacagacgctactcaaggtctccatctcctcgccatggaaagggccaagggagaagcagaagctactcaaggtctccgtctcctcgtcatgcaaggggccgaagctggacgtacagtaggtcgccaccgccaaggagggattacaacactggtggggaagagttgccgtcaaaaagcgcccattacagccccaaccccaggaggaacctcccaccaagggaacaagctgaacgcaatggctcatatcatggtgggagccccagaagaggtgaagctcgtgagaagcgccagtga

SEQ ID NO: 60 - protein, 254 aa, Panicum virgatum
MPRYDDRYDYDDRYDHYGRHGGNTKLYVGQISPHTQIHDLEDLFSKYGRLRKVDLKRDFGFVEFSDPRDADDARYDLDGRKFDGSCIVVEFARGVPRGPGGVRQYGRGPPGRCYNCGMDGHWVRDCKASDWRDRCYRCGEMGHLERNCQNSPKDLKRDRRYSRSPSPRHGKGQGRSRSYSRSPSPRHARGRSWTYSRSPPPRRDYNTGGEELPSKSAHYSPNPRRNLPPREQAERNGSYHGGSPRRGEAREKRQ

SEQ ID NO: 61 - DNA, 792 bp, Brassica napus
atgcctcgttatgaagatcgtcacggaagcacaagactctatgttggccacttgtcctcccgaactcggactcgtgatgttgaacgtctctttagcaaatatggaagagtacgagatgttgatatgaagcgtgactttgcctttgtcgattttagcgacccccgagatgctgatgatgcaaggtaccgcttagacggaagggacgttgatggaagccgcatcgttgttgaatttgccaaagggacaccgcgtggttctggttctggctatggttctcgtgagatatcttcaagcagaggaggacctcctcctccaggaagtggacgctgcttcaactgtggtcttgatggacactgggctagagattgcactgctggtgactggaagaacaaatgttatcgatgtggcgatagaggtcacattgagaggaactgcaagaacagtcccaagaagctcaagcgggaccaaagttactccagatcaccagttaggtctcggtcacctcctcgtcctagtagaagaaaccgcagcagaagcaaaagcccaagctacagtcgctcaagatccccggttaggactgaaaaggctcggactcctgaaccagctgcgaggagcaggagccctgaaccaacggttgttaactctcctccactcaaggatataaaccatagcctaagtcctaacgaaaagagcccagtgcctgagaagaacggtcaaagccctaaaggtcaagagaacggcaatggaaccaatggacaagaccacagtcctagagacgaacctagtccctga

SEQ ID NO: 62 - protein, 263 aa, Brassica napus
MPRYEDRHGSTRLYVGHLSSRTRTRDVERLFSKYGRVRDVDMKRDFAFVDFSDPRDADDARYRLDGRDVDGSRIVVEFAKGTPRGSGSGYGSREISSSRGGPPPPGSGRCFNCGLDGHWARDCTAGDWKNKCYRCGDRGHIERNCKNSPKKLKRDQSYSRSPVRSRSPPRPSRRNRSRSKSPSYSRSRSPVRTEKARTPEPAARSRSPEPTVVNSPPLKDINHSLSPNEKSPVPEKNGQSPKGQENGNGTNGQDHSPRDEPSP

SEQ ID NO: 63 - DNA, 798 bp, Brassica napus
atgcctcgttatgaagatcgtcacggaagcacgcgactctacgttggccacttgtcttctcgaacgcggactcgtgatgttgaacgtctctttagcaaatatggaagagtacgagatgttgatatgaagcgtgactttgcctttgtcgattttagcgacccccgagatgctgatgatgcaaggtaccgcttagacggaagggacgttgatggaagccgcatcgttgttgaatttgctaaagggacaccgcgtggttctggttctggttatggttctcgtgagatatcttcaagcagaggaggacctcctcctccaggaagcggacgctgcttcaactgtggtcttgatggacactgggctagagactgcactgctggtgactggaagaacaaatgttatcgatgtggcgatagaggtcacattgagaggaactgcaagaacagtcccaagaagctcaagcgggaccaaagttactccagatcaccagttaggtctccatctcctcctcgtcgtagtagaagaaaccgcagcagaagcagaagcagaagcccaagctacagtcgctcaagatccccggttaggactgaaaaggctcggactcctgaaccagctgtgaggagcaggagccctgagccaacggttgttaactcacctccactcaaggatagaaaccatagcctaagtcctaatgaaaagagcccaatgcctgagaagaacggtcaaagccctaaagatcaagagaacggcaatggaaccaatggacaagaccacagtcctagagacgaacccagtccctga

SEQ ID NO: 64 - protein, 265 aa, Brassica napus
MPRYEDRHGSTRLYVGHLSSRTRTRDVERLFSKYGRVRDVDMKRDFAFVDFSDPRDADDARYRLDGRDVDGSRIVVEFAKGTPRGSGSGYGSREISSSRGGPPPPGSGRCFNCGLDGHWARDCTAGDWKNKCYRCGDRGHIERNCKNSPKKLKRDQSYSRSPVRSPSPPRRSRRNRSRSRSRSPSYSRSRSPVRTEKARTPEPAVRSRSPEPTVVNSPPLKDRNHSLSPNEKSPMPEKNGQSPKDQENGNGTNGQDHSPRDEPSP

SEQ ID NO: 65 - DNA, 801 bp, Citrus clementina
  misc_feature (774)..(774): n is a, c, g, or t
atgcctcgttatgatgaccggtacggtggtacgcgtctctatgttggccgcttggcttcacggacaagatcacgcgatcttgaggagatcttcagcagatatgggagaattcgcgatgtggatatgaagcgtgacttcgcctttgttgaatttagcgaccctcgcgatgctgacgatgcaagatatagcttaaatggtcgggatgttgatggaagccgtatcattgtggaatttgcaagaggggggccacgtggtcctggtggatctcgtgagtatcttggtcgaggccctcctcctggatctgggcgctgcttcaattgtgggattgatggccattgggctcgagactgcaaggctggagactggaagaataagtgttatcgctgtggtgaacgaggccacatagaacgaaattgtcaaaacagtccaaagaagttaaggaggcctcggagttattcacgttctccaagtcctcgtcgtggtagaagcaggagccgtagttacagtagaggccgcagcgacagccgatcacgatcgcctgtaaagagagataggagtgttgaacgttttgagagaagaacaaggagcccccgagacagtaggagccctaagcgtcgcagaaattcaccaccatcatctaaaggtaggaagcgtagtccaaccccagatgaaagaagtccacaagatcaacgtagcccatccccaagggaccggaggcaggctaatggatcagagtacagtggcagtcccaggggaaagagcagaaccctgtangaccatgccgaaggcctggaggaatag

SEQ ID NO: 66 - protein, 266 aa, Citrus clementina
  misc_feature (258)..(258): Xaa can be any naturally occurring amino acid
MPRYDDRYGGTRLYVGRLASRTRSRDLEEIFSRYGRIRDVDMKRDFAFVEFSDPRDADDARYSLNGRDVDGSRIIVEFARGGPRGPGGSREYLGRGPPPGSGRCFNCGIDGHWARDCKAGDWKNKCYRCGERGHIERNCQNSPKKLRRPRSYSRSPSPRRGRSRSRSYSRGRSDSRSRSPVKRDRSVERFERRTRSPRDSRSPKRRRNSPPSSKGRKRSPTPDERSPQDQRSPSPRDRRQANGSEYSGSPRGKSRTLXDHAEGLEE

SEQ ID NO: 67 - DNA, 813 bp, Nicotiana tabacum
atgccgcggtatgatgataggtatggtggtacacgcctctatgttggacatttgtcttccagaacgcgatctcgagacttggaggacgtcttcagcagatacgggagagtacgtgatgtggatatgaagcgtgactatgcttttgtggaatttagtgatcctcgagatgctgatgatgcaagatatggcctaaatgggcgagacgttgatggaagccgtattactgtggaattcgcaaaaggggtacctcgtggtccaggtggatctcgagagtttggcggcagaggtcctcctccaggtacaggtcgttgctttaattgtggacttgatggccattgggctcgagattgtaaggctggggactggaagaacaagtgttaccgctgtggggagcgaggtcatatagaaagaaactgtcagaatagccccaagaaattgaaacgtggacgaagttattcccgctcaccgtctcctcgtcgtggcagaagtcgcagccacagttacagcagaggtcgtagctacagccgatccaggtctcctgtgaggagggactccaggtctcctgtgaagagcgactccaggtctcctgtgaagagggaccgtagcattgagcatgaagaaagaagatcaagaagtcctcgccctcatagatcatcaccacctccatcaaaaggaagaaatacagcccttcacctgatgaaagagtccacaagagagagtacgccgtcccctagggtgataggcagccaatggtctgatcatagcaggagccctacgacgatgctgatagacgacgcagaattgagtctatga

SEQ ID NO: 68 - protein, 270 aa, Nicotiana tabacum
MPRYDDRYGGTRLYVGHLSSRTRSRDLEDVFSRYGRVRDVDMKRDYAFVEFSDPRDADDARYGLNGRDVDGSRITVEFAKGVPRGPGGSREFGGRGPPPGTGRCFNCGLDGHWARDCKAGDWKNKCYRCGERGHIERNCQNSPKKLKRGRSYSRSPSPRRGRSRSHSYSRGRSYSRSRSPVRRDSRSPVKSDSRSPVKRDRSIEHEERRSRSPRPHRSSPPPSKGRNTALHLMKESTRESTPSPRVIGSQWSDHSRSPTTMLIDDAELSL

SEQ ID NO: 69 - DNA, 825 bp, Triticum aestivum
atgcctcgctacgatgagcgtgatcgttacggtggcaacacaaggctgtacgtgggtcgtcttccctcgcgcacccgcacaagggacctcgaagacctcttcggcagatatgggagagtgcgacatgtggatatgaagcacgagtttgcatttgttgagtttagtgatcccagggatgctgatgaagcaaggtacaatcttgatggtcgtgactttgatggaagccgcatgattgttgagtttgctaaaggggttccgcgtggccaaggaggaggaggtgaccgtgaccgtggtggccgtggtggtgaccgtgaatatatgggtcggggacctcctcctggttctgggcgttgctttaactgtgggattgatgggcattgggctcgggactgcaaagctggcgactggaaaaacaggtgctatcgttgtggagatagtggccacatagaaagggattgtcagaacagccctaagaacctcaagcgtggaaagagttactccagatctccatctcctcgccgcggaagggtgcgtgataggagctacagcaggagcccccgtggcagtcgcagccctatgaggagcccccgtgacagtcgcagccctaggaggagtgcttcacctgccaaggggagggcccggagccccacccctcctggcagcaggagccctgcaccaagggataacagcaggagcccaatgaaggctgacagccctaaaaacatgagcccagctgccaatggtcgtagcctgagccccagggacggcgaagacaatggccaccaccgtgcacccagtggaagtgcatcacccggtggtggttag

SEQ ID NO: 70 - protein, 274 aa, Triticum aestivum
MPRYDERDRYGGNTRLYVGRLPSRTRTRDLEDLFGRYGRVRHVDMKHEFAFVEFSDPRDADEARYNLDGRDFDGSRMIVEFAKGVPRGQGGGGDRDRGGRGGDREYMGRGPPPGSGRCFNCGIDGHWARDCKAGDWKNRCYRCGDSGHIERDCQNSPKNLKRGKSYSRSPSPRRGRVRDRSYSRSPRGSRSPMRSPRDSRSPRRSASPAKGRARSPTPPGSRSPAPRDNSRSPMKADSPKNMSPAANGRSLSPRDGEDNGHHRAPSGSASPGGG

SEQ ID NO: 71 - DNA, 837 bp, Nicotiana benthamiana
atgccgcggtatgatgataggtatggtggtacacgcctctatgttggacatttgtcttccagaacgcgatctcgagacttggaggatgtcttcagcagatacgggagagtacgtgatgtggatatgaagcgtgactatgcttttgtggaatttagtgatcctcgagatgctgatgatgcaagatatggcctaaatgggcgggatgttgatggaagccgtattactgtggaatttgcaaaaggggtacctcgtggtccaggtggatctcgagagtttggcggcagaggtcctcctccaggtacaggccgttgctttaattgtggacttgatggccattgggctcgagattgtaaggctggggactggaagaacaagtgttaccgctgtggggagcgaggtcatatagaaagaaactgtcagaatagccccaagaaattggaacgtggacgaagttattcccgctcaccgtctcctcgtcatggcagaagtcgcagtcgcagccgcagttacagcggaggtcgtagctacagccgatccaggtctcctgtgaggagagactccaggtctcctgtgaagagggaccgtagcattgagcatgaagagagaaaatcaagaagtcctcgccctcgtagatcatcaccacctccatcaaaaggaaggaaatacagcccttcacctgataaaagaagtccacaagagagaggtacgccgtcccctaagggtgatagggcagccaatggttctgagtatagcaggagccctacagacgatgctggaatagacgaacacagaaatttgagtcctattgaaagaaaatggccgcagtcgcagcaatag

SEQ ID NO: 72 - protein, 278 aa, Nicotiana benthamiana
MPRYDDRYGGTRLYVGHLSSRTRSRDLEDVFSRYGRVRDVDMKRDYAFVEFSDPRDADDARYGLNGRDVDGSRITVEFAKGVPRGPGGSREFGGRGPPPGTGRCFNCGLDGHWARDCKAGDWKNKCYRCGERGHIERNCQNSPKKLERGRSYSRSPSPRHGRSRSRSRSYSGGRSYSRSRSPVRRDSRSPVKRDRSIEHEERKSRSPRPRRSSPPPSKGRKYSPSPDKRSPQERGTPSPKGDRAANGSEYSRSPTDDAGIDEHRNLSPIERKWPQSQQ

SEQ ID NO: 73 - DNA, 849 bp, Hordeum vulgare
atgccccggtatgacgaccgttacgatcgctatgatgaccgttatgatcgttacgacgaccgttacgatcgctataatgaccgttatgatcggtatgaccaatatggtggcaacaccaagttgtacgtgggccatctttctacccacacccggaccaaggatgttgagtaccttttcggcagatatgggagaatacgatgtgtggagctgaagcatgattatggctttgttgagtttagcaatccccgggatgcagatgatgcaaggtatgagcttgatggccaagatgttgacgggagccgtatcattgttgagtttgcaagagggaccccgcgtggcccaggaggttcccgcgagtacttgggcagaggacctcctcctggttctggccgctgctttaactgtgggattgatgggcactgggctcgtgactgcaatgctggcgactggaaaaataagtgttatcgctgtggagaaaagggccatatagaaaaaaactgccagaacagtcctaagaatctcaagcggggaagaagctactcacgctccccaccaccttatcgtggaatgagccgaagcaggagttacagccgatcgccttatacaaggagggatgattgtgccgttggccatgaggaaaggcgaccaagaagctctagttacagtcctaggaggagtgcttcaccttccggtttgaaccgcagcccagcaccaaatggcaagagccacccaccaagggagcaagctgaagtcaatggtttacataacggtgtgagaggcaacagcctgagtccagctcgtgatagccgccctgccactaacggaaggagccccagcgcgtgggagtga

SEQ ID NO: 74 - protein, 282 aa, Hordeum vulgare
MPRYDDRYDRYDDRYDRYDDRYDRYNDRYDRYDQYGGNTKLYVGHLSTHTRTKDVEYLFGRYGRIRCVELKHDYGFVEFSNPRDADDARYELDGQDVDGSRIIVEFARGTPRGPGGSREYLGRGPPPGSGRCFNCGIDGHWARDCNAGDWKNKCYRCGEKGHIEKNCQNSPKNLKRGRSYSRSPPPYRGMSRSRSYSRSPYTRRDDCAVGHEERRPRSSSYSPRRSASPSGLNRSPAPNGKSHPPREQAEVNGLHNGVRGNSLSPARDSRPATNGRSPSAWE

SEQ ID NO: 75 - DNA, 849 bp, Saccharum officinarum
atgcctcgctacgatgatcgctatgggaatacacgcttgtatgttggaagattggctccccgcacccgttcccgcgacctagaatatcttttcagcaaatatggaagaatacgtgaagtggagttgaagcgcgactatgcattcattgaattcagcgacccccaagatgctgatgatgcgcagtacaacctagatggcagggaagttgatggaagccggattattgttgaatttgctaaaggggttcctcgtgcttctagtggttcacgtgaatatatgggaagaggacctccaccaggaacaggtcgttgttttaactgtggaattgatggtcactgggcaagagactgcaaggctggtgactggaaaaacaaatgttaccgctgtggcgaaaggggacatatagaaagaaattgccagaacagtccaaggaatctcaggcgtgagagaagctactcacgttctccatccccacgccgtggacggggccgcagccggagctacagcagaagccagagctatagccgatccagggccccatctggatctcccgaggggttgcacgccggtgaccgtgaccaagaggagaatcaaggagtggttagcttccagcaggagccgcaggccctaggcggttctgtcttaccctgcaaaggaaaaagaaccgcacccgcacaccttgtggcagcaaggaaccccaaagagcccccaccccaagggatggatgtgaagccccccacccaagggttatggtgcccagcaacggtttataaccttgaaaaaaagcctcggggccccgggaaaaccgcaaggaggagttcgggcgcccttctgtttgggcttccgtaa

SEQ ID NO: 76 - protein, 282 aa, Saccharum officinarum
MPRYDDRYGNTRLYVGRLAPRTRSRDLEYLFSKYGRIREVELKRDYAFIEFSDPQDADDAQYNLDGREVDGSRIIVEFAKGVPRASSGSREYMGRGPPPGTGRCFNCGIDGHWARDCKAGDWKNKCYRCGERGHIERNCQNSPRNLRRERSYSRSPSPRRGRGRSRSYSRSQSYSRSRAPSGSPEGLHAGDRDQEENQGVVSFQQEPQALGGSVLPCKGKRTAPAHLVAARNPKEPPPQGMDVKPPTQGLWCPATVYNLEKKPRGPGKTARRSSGALLFGLP

SEQ ID NO: 77 - DNA, 849 bp, Triticum aestivum
atgcctcgctatgatgaccgttacgatcgctacgatgaccgttatgatcgttatgacgaccgttttgatcgctataatgaccgttatgatcggtatgaccgatatggtggcaacaccaagttgtacgtgggccatctttctacgcacacccggaccaaggatgttgagtaccttttcggcagatatgggagaatacgatgtgtggagctgaagtatgattatggcttcgttgagtttagcgatccccgggatgcagatgatgcaaggtatgagcttgatggccaagagattgatgggagccgcatcattgttgagtttgcaagagggatcccgcgtggcccaggaggttcccgcgagtacttgggcagaggaccccctcctggttctggccgctgctttaactgtgggattgatgggcactgggctcgtgactgcaatgctggcgactggaaaaataagtgctatcgctgtggagaaaagggccatatagaaaaaaactgccagaacagtcctaagaatatcaagcggggaagaagctactcacgctccccaccacctcatcgcgaaaggagcctaagcaggagttacagccgatcgccttatccaaggagggatgatcgagctgttggccatgaggaaaggcgaccaagaagctctagttacagccctaggaggagtgcttcaccttccggtttgaaccgcagcccagcaccaaatggcaagagccacccaccaaaggagcaagctgaagtcaatggttcacataacggtgtgagaggcaacagcctgagtcccgcccgtgatagccgcccagccaccaacagaatgagccctagcccctgggagtga

SEQ ID NO: 78 - protein, 282 aa, Triticum aestivum
MPRYDDRYDRYDDRYDRYDDRFDRYNDRYDRYDRYGGNTKLYVGHLSTHTRTKDVEYLFGRYGRIRCVELKYDYGFVEFSDPRDADDARYELDGQEIDGSRIIVEFARGIPRGPGGSREYLGRGPPPGSGRCFNCGIDGHWARDCNAGDWKNKCYRCGEKGHIEKNCQNSPKNIKRGRSYSRSPPPHRERSLSRSYSRSPYPRRDDRAVGHEERRPRSSSYSPRRSASPSGLNRSPAPNGKSHPPKEQAEVNGSHNGVRGNSLSPARDSRPATNRMSPSPWE

SEQ ID NO: 79 - DNA, 852 bp, Brassica napus
atgcctcgatttgatgatcgatatggaaacactcgcctctacgttggccgcttgtcatctagaactcgtagcagggatcttgagcgtcttttcagcagatacggaagagtacgagatgttgatatgaagcgtgactatgcctttgttgagtttagcgatcctcgtgatgctgatgacgcaagatactacttagatggacgagacttcgatggaagtcgcatcactgtggaggcttccagaggggcacctcgtggttctcgggacagtggtagcagaggtccgcctcctggttctggtcgctgttttaactgcggtgttgatggtcattgggctagagactgcacagcaggtgactggaagaacaaatgttaccgctgtggtgaaagaggacacattgagagaaactgcaagaacagtcctagtcctaagaaggccaggcgtggtggaagctactccaggtcaccagttaaatcacgctcccctcgccgcagaagaagcccaagccggagccgtagttacagtcgtggtcgtagctacagtcgttcacgatcgccagtgagaagagagagaagcgttgaggatagatcacttagtcctaagccaatggagcgatccgtatctcccataggcaaagaccaaagcctgagtccagaccgaagagtcgtagatgcaagcccaaaactagaaaagcaagatgggtcggactatgaaggcagcccaagagaaaatggtaatggcaagagctctgtgagtcccattgcgggaggtgaagaaagtcctcaagacaggagccccgttgatgatgagcctgagcttaaccgttcttcccctaaaggcagcgagtcaccttga

SEQ ID NO: 80 - protein, 283 aa, Brassica napus
MPRFDDRYGNTRLYVGRLSSRTRSRDLERLFSRYGRVRDVDMKRDYAFVEFSDPRDADDARYYLDGRDFDGSRITVEASRGAPRGSRDSGSRGPPPGSGRCFNCGVDGHWARDCTAGDWKNKCYRCGERGHIERNCKNSPSPKKARRGGSYSRSPVKSRSPRRRRSPSRSRSYSRGRSYSRSRSPVRRERSVEDRSLSPKPMERSVSPIGKDQSLSPDRRVVDASPKLEKQDGSDYEGSPRENGNGKSSVSPIAGGEESPQDRSPVDDEPELNRSSPKGSESP

SEQ ID NO: 81 - DNA, 855 bp, Arabidopsis lyrata
atgcctcgctatgatgatcgctatggaaacactcgcctctatgttggtcgcttgtcatctagaactcgtgccagagaccttgaacgtctatttagcagatacggaagagtacgtgatgtggatatgaagcgtgattatgcctttgttgaatttagtgatcctcgtgatgctgatgacgcaagatattacttggatggacgggatttcgatggaagtcgcatcactgtggaggcatcaagaggggcgcctcgtggttctcgggacaatggtagcagaggccctcctcctggttctggtcgctgttttaattgtggtgttgatggtcactgggcccgagactgcacagcaggagactggaagaataaatgttaccgctgtggagaaagaggacacatcgagagaaactgcaagaacagtcctagtccaaagaaggccaggcagggtggaagctattccaggtcaccagtcaaatcccgctcccctcgtcgccgaaggagcccaagccgtagccgtagttacagtcgaggtcgcagttacagtcgatcgcgatccccagtgagaagagagaaaagcgtagaggacagatcacgcagccctaaggcaatggagcgatctttgtcacctaaaggcagggaccaaagcctgagcccagaccaaaaagtgacagatgcgagcccaaagcgtggatcagagtatgatggtagtccaaaagagaatggtaatggcaggaactctgtgagtcccattgttagaggtgatgaaagtcctgttggacttaatggtcaagacaggagtcccattgatgatgaggctgagcttaaccgtccttcccctaaaggcagtgagtcaccttga

SEQ ID NO: 82 - protein, 284 aa, Arabidopsis lyrata
MPRYDDRYGNTRLYVGRLSSRTRARDLERLFSRYGRVRDVDMKRDYAFVEFSDPRDADDARYYLDGRDFDGSRITVEASRGAPRGSRDNGSRGPPPGSGRCFNCGVDGHWARDCTAGDWKNKCYRCGERGHIERNCKNSPSPKKARQGGSYSRSPVKSRSPRRRRSPSRSRSYSRGRSYSRSRSPVRREKSVEDRSRSPKAMERSLSPKGRDQSLSPDQKVTDASPKRGSEYDGSPKENGNGRNSVSPIVRGDESPVGLNGQDRSPIDDEAELNRPSPKGSESP

SEQ ID NO: 83 - DNA, 855 bp, Arabidopsis thaliana
atgcctcgctatgatgatcgctatggaaacactcgcctctatgttggtcgcttatcatctagaactcgtaccagagaccttgagcgtctctttagcagatacggaagagtacgagatgtggatatgaagcgtgattatgcctttgttgaatttagtgatcctcgtgatgctgatgacgcaagatattacttggatggacgggatttcgatggaagtcgcatcactgtggaggcatcaagaggggctcctcgtggttcgcgggacaatggtagcagaggcccacctcctggttctggtcgctgttttaattgtggtgtcgatggccactgggcccgagactgcacagcaggagactggaagaataaatgttaccgctgtggtgaaagaggacacattgagagaaactgcaaaaacagtcctagtccaaagaaggccaggcagggtggaagctattccaggtcaccagtcaaatcccgctcccctcgtcgccgaaggagcccaagccgtagccgtagttacagtcgaggtcgcagctacagtcgatcgcgatccccagtgagaagagagaaaagcgtggaggacagatcacgcagtcctaaggcaatggagcgatctgtatctcccaaaggtagggaccaaagcctgagtccagaccgaaaagtgatagatgcaagcccaaagcgtggatcagactatgatggtagcccaaaagagaatggtaatggcaggaactctgcgagtcccattgttggaggtggtgaaagtcctgttggacttaatggtcaagacaggagcccgattgatgatgaggctgagcttagccgtccttcccctaaaggcagtgagtcaccttga

SEQ ID NO: 84 - protein, 284 aa, Arabidopsis thaliana
MPRYDDRYGNTRLYVGRLSSRTRTRDLERLFSRYGRVRDVDMKRDYAFVEFSDPRDADDARYYLDGRDFDGSRITVEASRGAPRGSRDNGSRGPPPGSGRCFNCGVDGHWARDCTAGDWKNKCYRCGERGHIERNCKNSPSPKKARQGGSYSRSPVKSRSPRRRRSPSRSRSYSRGRSYSRSRSPVRREKSVEDRSRSPKAMERSVSPKGRDQSLSPDRKVIDASPKRGSDYDGSPKENGNGRNSASPIVGGGESPVGLNGQDRSPIDDEAELSRPSPKGSESP

SEQ ID NO: 85 - DNA, 855 bp, Gossypium hirsutum
atgatgatcgttattgttcatactcgtctctatgttggccatatctcctcaagaacccgaacacgtgatctagaacgtctctttagccgatacgggagtttccgcagaatacttgatgtggatatgaagcgtgactatgcctttgttgactttagcgatccccgagatgctgatgatgcaaggtatagcttggatggtcgggactttgatggaagccgcattgttgttgagtttgcaaggggggtgccacgaggttctcgggaatatctagaaagaggcccccctcctggatctggtcgctgctttaattgtggtgttgatggccattgggccagagattgtacagctgaggactggaagaacaaatgttatcgttgtggagaaagaggtcacatagaacgaaactgcaggaacagtccccgaaaactgagttctcgttcacctattagatttcgctcacctcgccgtggcagaagccggggtcgaagttacagccgtggcctgagctactctcgttcaagatctccagttaggagagaacatagtttcagattagagagccctgaggctgagaacagcccatccctctccaaggggagtattcacagcccttctccccgaaatgggaaattgtctgctctgcaagatgaagccgattatgatgaccatagtcccaaggaagtgaaccggagccctgccagtccctatagagatgagagccctgacagaagccagtaccgaagctcttctgatggcaatggtcgcagcctaagtcccagtgtgagagaaaacaatagtcctgttgatgtcgaatatgattacccacttacaccgagaggaagcgagtcaccttaa

SEQ ID NO: 86 - protein, 284 aa, Gossypium hirsutum
MMIVIVHTRLYVGHISSRTRTRDLERLFSRYGSFRRILDVDMKRDYAFVDFSDPRDADDARYSLDGRDFDGSRIVVEFARGVPRGSREYLERGPPPGSGRCFNCGVDGHWARDCTAEDWKNKCYRCGERGHIERNCRNSPRKLSSRSPIRFRSPRRGRSRGRSYSRGLSYSRSRSPVRREHSFRLESPEAENSPSLSKGSIHSPSPRNGKLSALQDEADYDDHSPKEVNRSPASPYRDESPDRSQYRSSSDGNGRSLSPSVRENNSPVDVEYDYPLTPRGSESP

SEQ ID NO: 87 - DNA, 858 bp, Citrus clementina
atgcctcgttatgatgaccggtacggtggtacgcgtctctatgttggacgcttggcttcacggacaagatcacgtgatcttgaggagatcttcagcagatatgggagaattcgcgatgtggatatgaagcgtgacttcgcctttgttgaatttagcgaccctcgtgatgctgacgatgcaagatatagcttaaatggtcgggatgttgatggaagccgtatcattgtggaatttgcaagaggggggccacgtggtcctggtggatctcgtgagtatcttggtcgaggccctcctcctggatctgggcgctgcttcaattgtgggattgatggccattgggctcgagactgcaaggctggagactggaagaataagtgttatcgctgtggtgaacgaggccacatagaacgaaattgtcaaaacagtccaaagaagttaaggaggcctcggagttattcacgttctccaagtcctcgtcgtggtagaagcaggagccgtagttacagtagaggccgcagcgacagccgatcacgatcgcctgtcaagagagataggagtgttgaacgttttgagagaagaacaaggagcccccgagacagtaggagccctaagcgtcgcagaaattcaccaccatcatctaaaggtaggaagcgtagtccaaccccagatgaaagaagtccacaagatcaacgtagcccatccccaagggaccggaggcaggctaatggatcagagtacagtggcagtccaaggggaaagagcagaagccctgtagacgatgccgatggccctgaggataggaatacaggaaccctccggaagagattggccgcagccgaagccccgccgcagccctag

SEQ ID NO: 88 - protein, 285 aa, Citrus clementina
MPRYDDRYGGTRLYVGRLASRTRSRDLEEIFSRYGRIRDVDMKRDFAFVEFSDPRDADDARYSLNGRDVDGSRIIVEFARGGPRGPGGSREYLGRGPPPGSGRCFNCGIDGHWARDCKAGDWKNKCYRCGERGHIERNCQNSPKKLRRPRSYSRSPSPRRGRSRSRSYSRGRSDSRSRSPVKRDRSVERFERRTRSPRDSRSPKRRRNSPPSSKGRKRSPTPDERSPQDQRSPSPRDRRQANGSEYSGSPRGKSRSPVDDADGPEDRNTGTLRKRLAAAEAPPQP

SEQ ID NO: 89 - DNA, 858 bp, Fragaria vesca
atgcctcgctacgatgatcgatatgggaattcgcgtctttatgttggtcgcttggcttcacgcacccggacgcgtgatctggaccggattttcagcagatacgggagagtacgagatgtggacatgaagcgcgagtttgcatttgttgaattttatgatccgcgagatgctgatgatgcaagatatagcttagatggtagggaagttgatggtagtcgtctgattgtggagtttgctaagggggctccacgtggttcccgggaatacatgggcagaggtccaccacctggatctgggcgctgctttaattgtggtattgatggccactgggctcgtgattgtaaggctggtgattggaagaataaatgttatcgctgtggagaaagaggccatattgagaggcagtgcaaaaatagcccaaaagaattaaggcgtgagcggagtcgttcacgttctcctcgccgcggtagaagtcgtagcccaagttacagccgtagctacagccgatcaaggtccccaccaaggagagaacgaagcttggaaagggattatagatctcggagcccttcttatagaagccgtgatctgagcatgagtccagtgccctcaaaggggaggcagcgcagccttacacccgaggatgatagccctcgtggaaggggtagcctttctcctagaaatggcagcttaggccccagagatggtagcaaaagcccaacccctaagagcagaagtcctagccctgaccgtgagattgatagccctgttcgcccttctgctaatggtcgtaaccccagcccgagggaggatatgagccctgttgatgaggacgacgattacaaccgccgctccccttga

SEQ ID NO: 90 - protein, 285 aa, Fragaria vesca
MPRYDDRYGNSRLYVGRLASRTRTRDLDRIFSRYGRVRDVDMKREFAFVEFYDPRDADDARYSLDGREVDGSRLIVEFAKGAPRGSREYMGRGPPPGSGRCFNCGIDGHWARDCKAGDWKNKCYRCGERGHIERQCKNSPKELRRERSRSRSPRRGRSRSPSYSRSYSRSRSPPRRERSLERDYRSRSPSYRSRDLSMSPVPSKGRQRSLTPEDDSPRGRGSLSPRNGSLGPRDGSKSPTPKSRSPSPDREIDSPVRPSANGRNPSPREDMSPVDEDDDYNRRSP

SEQ ID NO: 91 - DNA, 858 bp, Gossypium hirsutum
atgcgtcgctatgatgatcgttattgtcatactcgtctctatgttggccatatctcctcaagaacccgaacacgtgatctagaacgtctctttagccgatacgggagaatacttgatgtggatatgaagcgtgactatgcctttgttgactttagcgatccccgagatgctgatgatgcaaggtatagcttggatggtcgggactttgatggaagccgcattgttgttgagtttgcaaggggggtgccacgaggttctcaggaatatctaggaagaggcccccctcctggatctggtcgctgctttaattgtggtgttgatggccattgggccagagattgtacagctgaggactggaagaacaaatgttatcgttgtggagaaagaggtcacatagaacgaaactgcaggaacagtccccgaaaactgagtagttctcgttcacctattagatctcgctcacctcgccgtggcagaagccggggtcgaagttacagccgaggcctgagctactctcgttcaagatctccggttaggagagaacatagtttcagattagagagccctgaggctgagaacagcccatccctctccaaggggaggaatcacagcccttctccccgaaatcggaaattgtctgctctgcaagatgaagccgattatgatgaccatagtcccaaggaagtgaaccggagccctgccagtcccgatagagatgagagccctgacagaaaccagtaccgaagctcttctgatggcaatggtcgcagcctaagtcccagtgtgagagacaacaatagtcctgttgatgtcgaatatgatgacccacttacaccgagaggaagcgcatcaccttaa

SEQ ID NO: 92 - protein, 285 aa, Gossypium hirsutum
MRRYDDRYCHTRLYVGHISSRTRTRDLERLFSRYGRILDVDMKRDYAFVDFSDPRDADDARYSLDGRDFDGSRIVVEFARGVPRGSQEYLGRGPPPGSGRCFNCGVDGHWARDCTAEDWKNKCYRCGERGHIERNCRNSPRKLSSSRSPIRSRSPRRGRSRGRSYSRGLSYSRSRSPVRREHSFRLESPEAENSPSLSKGRNHSPSPRNRKLSALQDEADYDDHSPKEVNRSPASPDRDESPDRNQYRSSSDGNGRSLSPSVRDNNSPVDVEYDDPLTPRGSASP

SEQ ID NO: 93 - DNA, 858 bp, Glycine max
atgcctcgctatgatgataaatacggcaatacccgcctctatgtgggacacttgtcttcgaggactcgttcccgtgatctggagcgtgcctttagcagatatggaagagttcgaggtgtggatatgaagaatgatttcgcttttgttgattttagtgatcctcgagatgctgatgatgcaagatataacctggatggtcgggatgttgatggaagtcggattattgtggaatttgcaaaaggggctcctcgtgggtcccgggaatatttggggcgaggtcctcctcctggctctggacgctgcttcaattgtggccttgatggccattgggcacgggattgcaaagctggggattggaagaataagtgttaccgctgtggggagagaggacatatagaaaggaactgcaagaacagccccaaaaaattgaggcgaggacggagttattcacgctcaccagtcaggtcacgttcacctcatcgcggcagaagccgtgatcgcagttacagccgagatcgcagctacagtcgatcacgatcccctgtcagaagagaagaaagccctgttcgggaagataggtcacaaagccctgatcacaaaaatagtcctcagccctccaagacaaggaagcatagtccatcacctgaccgtagcccacagaaaagaggtgacacatctcccgacaatgataggttgagtagaagccctgcaagggaccctgaagataggggctatgacagccctaaagttaatggtcgtagtggcagccctagctgtagccccagggatgatgacaggagccccattgacgatgacaacaaccaccgccactcgccaagaggcagcgagtcaccttaa

SEQ ID NO: 94 - protein, 285 aa, Glycine max
MPRYDDKYGNTRLYVGHLSSRTRSRDLERAFSRYGRVRGVDMKNDFAFVDFSDPRDADDARYNLDGRDVDGSRIIVEFAKGAPRGSREYLGRGPPPGSGRCFNCGLDGHWARDCKAGDWKNKCYRCGERGHIERNCKNSPKKLRRGRSYSRSPVRSRSPHRGRSRDRSYSRDRSYSRSRSPVRREESPVREDRSQSPDHKNSPQPSKTRKHSPSPDRSPQKRGDTSPDNDRLSRSPARDPEDRGYDSPKVNGRSGSPSCSPRDDDRSPIDDDNNHRHSPRGSESP

SEQ ID NO: 95 - DNA, 864 bp, Glycine max
atgcctcgctatgatgataaatacggcaatacccgcctctatgtggggcacttatcttcgaggactcgttcccgggatctggagcgtgccttcagcagatatggaagagttcggggtgtggatatgaagaatgatttcgcctttgttgattttagtgatcctcgagatgctgatgatgcaagatataacttggatggtcgggatgttgatggaagtcgtattattgtggaatttgcaaaaggggctcctcgtgggtcccgggaatatttggggcgaggtcctcctcctggctctggacgctgctttaattgtggccttgatggtcattgggcacgggattgcaaagctggggattggaagaataagtgttaccgctgtggggagagaggacatatagaaaggaactgcaagaacagccccaaaaaattgagcacaaggcgaggacggagttattcacggtcaccagtcaggtcacattcacctcgtcgtggcagaagccgtgatcgcagttacagccgagatcgcagctacagtcgatcacgatcccctgtcagaagagaagaaagccccgttcgtgaagataggtcacaaagccctcaacacaaaaatagtcctcagccctccaagacaaggaagcatagtccatcacctgaccgtagcccacagagaagaggtgacacatctcctgacaatgataggttgagcagaagccctgcaagggaccgcgaagataggggctatgacagccctaaagttaatggtcgtagtggcagccctagccgtagccccagggatgatgacaggagccccattgatgatgaagacaaccaccgccactcaccaagaggcagcgagtcaccttaa

SEQ ID NO: 96 - protein, 287 aa, Glycine max
MPRYDDKYGNTRLYVGHLSSRTRSRDLERAFSRYGRVRGVDMKNDFAFVDFSDPRDADDARYNLDGRDVDGSRIIVEFAKGAPRGSREYLGRGPPPGSGRCFNCGLDGHWARDCKAGDWKNKCYRCGERGHIERNCKNSPKKLSTRRGRSYSRSPVRSHSPRRGRSRDRSYSRDRSYSRSRSPVRREESPVREDRSQSPQHKNSPQPSKTRKHSPSPDRSPQRRGDTSPDNDRLSRSPARDREDRGYDSPKVNGRSGSPSRSPRDDDRSPIDDEDNHRHSPRGSESP

SEQ ID NO: 97 - DNA, 864 bp, Glycine max
atgcctcgctatgatgataaatacggcaatacccgcctctatgtgggacacttgtcttcgaggactcgttcccgtgatctggagcgtgcctttagcagatatggaagagttcgaggtgtggatatgaagaatgatttcgcttttgttgattttagtgatcctcgagatgctgatgatgcaagatataacctggatggtcgggatgttgatggaagtcggattattgtggaatttgcaaaaggggctcctcgtgggtcccgggaatatttggggcgaggtcctcctcctggctctggacgctgcttcaattgtggccttgatggccattgggcacgggattgcaaagctggggattggaagaataagtgttaccgctgtggggagagaggacatatagaaaggaactgcaagaacagccccaaaaaattgagcaccaggcgaggacggagttattcacgctcaccagtcaggtcacgttcacctcatcgcggcagaagccgtgatcgcagttacagccgagatcgcagctacagtcgatcacgatcccctgtcagaagagaagaaagccctgttcgggaagataggtcacaaagccctgatcacaaaaatagtcctcagccctccaagacaaggaagcatagtccatcacctgaccgtagcccacagaaaagaggtgacacatctcccgacaatgataggttgagtagaagccctgcaagggaccctgaagataggggctatgacagccctaaagttaatggtcgtagtggcagccctagctgtagccccagggatgatgacaggagccccattgacgatgacaacaaccaccgccactcgccaagaggcagcgagtcaccttaa

SEQ ID NO: 98 - protein, 287 aa, Glycine max
MPRYDDKYGNTRLYVGHLSSRTRSRDLERAFSRYGRVRGVDMKNDFAFVDFSDPRDADDARYNLDGRDVDGSRIIVEFAKGAPRGSREYLGRGPPPGSGRCFNCGLDGHWARDCKAGDWKNKCYRCGERGHIERNCKNSPKKLSTRRGRSYSRSPVRSRSPHRGRSRDRSYSRDRSYSRSRSPVRREESPVREDRSQSPDHKNSPQPSKTRKHSPSPDRSPQKRGDTSPDNDRLSRSPARDPEDRGYDSPKVNGRSGSPSCSPRDDDRSPIDDDNNHRHSPRGSESP

SEQ ID NO: 99 - DNA, 864 bp, Glycine max
atgcctcgctatgatgataaatacggcaatacccgcctctatgtggggcacttatcttcgaggactcgttcccgggatctggagcgtgccttcagcagatatggaagagttcggggtgtggatatgaagaatgatttcgcctttgttgattttagtgatcctcgagatgctgatgatgcaagatataacttggatggtcgggatgttgatggaagtcgtattattgtggaatttgcaaaaggggctcctcgtgggtcccgggaatatttggggcgaggtcctcctcctggctctggacgctgctttaattgtggccttgatggtcattgggcacgggattgcaaagctggggattggaagaataagtgttaccgctgtggggagagaggacatatagaaaggaactgcaagaacagccccaaaaaattgagcaccaggcgaggacggagttattcacgctcaccagtcaggtcacgttcacctcatcgcggcagaagccgtgatcgcagttacagccgagatcgcagctacagtcgatcacgatcccctgtcagaagagaagaaagccccgttcgtgaagataggtcacaaagccctcaacacaaaaatagtcctcagccctccaagacaaggaagcatagtccatcacctgaccgtagcccacagagaagaggtgacacatctcctgacaatgataggttgagcagaagccctgcaagggaccgcgaagataggggctatgacagccctaaagttaatggtcgtagtggcagccctagccgtagccccagggatgatgacaggagccccattgatgatgaagacaaccaccgccactcaccaagaggcagcgagtcaccttaa

SEQ ID NO: 100 - protein, 287 aa, Glycine max
MPRYDDKYGNTRLYVGHLSSRTRSRDLERAFSRYGRVRGVDMKNDFAFVDFSDPRDADDARYNLDGRDVDGSRIIVEFAKGAPRGSREYLGRGPPPGSGRCFNCGLDGHWARDCKAGDWKNKCYRCGERGHIERNCKNSPKKLSTRRGRSYSRSPVRSRSPHRGRSRDRSYSRDRSYSRSRSPVRREESPVREDRSQSPQHKNSPQPSKTRKHSPSPDRSPQRRGDTSPDNDRLSRSPARDREDRGYDSPKVNGRSGSPSRSPRDDDRSPIDDEDNHRHSPRGSESP

SEQ ID NO: 101 - DNA, 864 bp, Triticum aestivum
atgcctcgctatgatgaccgttacgatcgctacgatgaccgttatgatcgttatgacgaccgttttgatcgctataatgaccgttatgatcggtatgaccgatatggtggcaacaccaagttgtacgtgggccatctttctacgcacacccggaccaaggatgttgagtaccttttcggcagatatgggagaatacgatgtgtggagctgaagtatgattatggctttgttgagtttagcgatccccgggatgcagatgatgcaaggtatgagcttgatggccaagaggttgatgggagccgcatcattgttgagtttgcaagagggaccccgcgtggcccaggaggttcccgcgagtacttgggcagaggaccccctcctggttctggccgctgctttaactgtgggattgatgggcactgggctcgtgattgcaatgctggcgactggaaaaataagtgctatcactgtggagaaaagggccatatagaaaaaaactgccagaacagtcctaagaatatcaacttttgcaaatacaggcggggaagaagctactcacgctccccaccacctcatcgcgaaaggagcctaagcaggagttacagccgatcgccttatccaaggagggatgatcgagctgttggccatgaggaaaggcgaccaagaagctctagttacagccctaggaggagtgcttcaccttccggtttgaaccgcagcccagcaccaaatggcaagagccacccaccaaaggagcaagctgaagtcaatggttcacataacggtgtgagaggcaacagcctgagtcccgcccgtgatagccgcccagccaccaacagaatgagccctagcccctgggagtga

SEQ ID NO: 102 - protein, 287 aa, Triticum aestivum
MPRYDDRYDRYDDRYDRYDDRFDRYNDRYDRYDRYGGNTKLYVGHLSTHTRTKDVEYLFGRYGRIRCVELKYDYGFVEFSDPRDADDARYELDGQEVDGSRIIVEFARGTPRGPGGSREYLGRGPPPGSGRCFNCGIDGHWARDCNAGDWKNKCYHCGEKGHIEKNCQNSPKNINFCKYRRGRSYSRSPPPHRERSLSRSYSRSPYPRRDDRAVGHEERRPRSSSYSPRRSASPSGLNRSPAPNGKSHPPKEQAEVNGSHNGVRGNSLSPARDSRPATNRMSPSPWE

SEQ ID NO: 103 - DNA, 873 bp, Arabidopsis thaliana
atgcctcgctatgatgatcgctatgggaacactcgtctttacgttggccgattatcatcgagaactaggacccgagaccttgaacgtctttttagcagatacggaagagtgcgagatgtggatatgaagcgagattatgctttcgttgaatttggtgatccccgtgatgctgatgatgcaagacattacctggacggacgagactttgatggaagtcgcatcactgtggagttttcacgaggggcacctcgtggttctcgggattttgatagcagaggcccaccacctggagctggtcgctgttttaactgtggtgtagatggtcattgggctcgtgactgcacagcaggggactggaagaacaagtgttaccgttgtggagagagaggacacattgagagaaactgcaaaaacagccccaagaagcttaggcgcagtggaagctactccaggtcacctgtaagatcccgttctcctcgtcgtagaagaagcccaagccggagtcttagccgtagccgaagctacagccgatcacgatccccggtgagaagaagagagaggagtgtggaggagagatcacgcagtccaaagcggatggatgactctctatcgccaagagccagagatcgtagtccggttcttgatgatgaaggcagcccaaagatcatagacgggagcccaccaccatcaccaaagcttcaaaaggaagtcggatctgaccgtgacggtggtagcccccaagacaatggcagaaactctgttgtcagtcctgttgtaggagccggtggtgacagttcgaaagaggaccggagccctgttgatgatgattacgagccaaaccgcacttcccctagaggaagtgagtctccttaa

SEQ ID NO: 104 - protein, 290 aa, Arabidopsis thaliana
MPRYDDRYGNTRLYVGRLSSRTRTRDLERLFSRYGRVRDVDMKRDYAFVEFGDPRDADDARHYLDGRDFDGSRITVEFSRGAPRGSRDFDSRGPPPGAGRCFNCGVDGHWARDCTAGDWKNKCYRCGERGHIERNCKNSPKKLRRSGSYSRSPVRSRSPRRRRSPSRSLSRSRSYSRSRSPVRRRERSVEERSRSPKRMDDSLSPRARDRSPVLDDEGSPKIIDGSPPPSPKLQKEVGSDRDGGSPQDNGRNSVVSPVVGAGGDSSKEDRSPVDDDYEPNRTSPRGSESP

SEQ ID NO: 105 - DNA, 876 bp, Arachis hypogaea
atgcctcgctatgaagataaatacggcaacacacgcctctatgttggtcgattggcttcaaggacgcgttcccgtgatctggagcgagttttcagccgatatggaagagttcgagatgtggatatgaagcatgattacgcctttgttgaattcagcgatcctagagatgctgatgatgcaagatacaacttggatggccgtgatgttgatggaagtcgtattattgtggaatttgcgaaaggggttcctcgtggttcccgtgaatatttgggtcgtggtcctcctcctggaactgggcgttgctttaactgtggtattgatggccattgggcccgagattgcaaagctggagactggaagaacaagtgttatcattgtggtgagaggggtcatatagaaaaaaactgcaagaacagtcccaaaaagctgagtagacgtgggcgtagttattcctgctctccggtcaggtcacgttccccagtcaggtcacgctctcctcgtcgtggcagaagcagggacaggagttacaccccagaacgcagttacagtcgatcaagatccccagttaggggggatcgaagcccagttcgtgatagatcagagagcccacgctctagaagccctgaacccaaaggtagccctcagccctcgaaggcaaggaagcatagtccatcacctgatgaagggagtccacagaagagaggtgatgcatctcctggcaatgagaggatggttacacagcaagatggatctgattacagtgatggccccagaggaaagagcagaagccccactagtccagcaggggatgacagcccaaaggctaatggtcgcagcgcagtcctagtcccagagatgatgacaggagtccattga

SEQ ID NO: 106 - protein, 291 aa, Arachis hypogaea
MPRYEDKYGNTRLYVGRLASRTRSRDLERVFSRYGRVRDVDMKHDYAFVEFSDPRDADDARYNLDGRDVDGSRIIVEFAKGVPRGSREYLGRGPPPGTGRCFNCGIDGHWARDCKAGDWKNKCYHCGERGHIEKNCKNSPKKLSRRGRSYSCSPVRSRSPVRSRSPRRGRSRDRSYTPERSYSRSRSPVRGDRSPVRDRSESPRSRSPEPKGSPQPSKARKHSPSPDEGSPQKRGDASPGNERMVTQQDGSDYSDGPRGKSRSPTSPAGDDSPKANGRSAVLVPEMMTGVH

SEQ ID NO: 107 - DNA, 876 bp, Brassica napus
atgcctcgctttgatgatcgatatggaaacactcgcctttacgttggtcgcttgtcatctagaactcgcaccagagaccttgagcgtcttttcagcagatacggaagagtacgagatgttgatatgaagcgcgattatgcctttgttgaatttagcgatcctcgtgatgctgatgacgctagacattaccttgatggacgagacttcgatggaagtcgcatcactgtggaggcttccagaggggcacctcgtggttctcgggatgctcgggataatggtagtagaggtccacctcctggttctggacgctgttttaactgcggtgtcgatggtcattgggctcgggactgcacagcaggggactggaagaacaaatgttaccgctgtggtgaaagaggacacattgagagaaactgcaagaacagtgctagtcctaagaaggccaggggtggtggaagctactccaggtcaccagttaaatcacgctctcctcgccgcagaagaagcccaagccgtagccgtagttacagccgtggtcgtagctacagccgatcacggtcgccagtgagaagagagagaagcgtggaggatagatcactcagtcctaaggcaatggagcgatctgtatctcccagaggcaaagaccaaagcatgagtccagagcgaagggtcgtagatgcaagcccaaaacgggaaaagcaagacggatcagactatgaaggtagcccaaaagagaatggtaatgggaagagctctgtgagtcccattgtgggaggtgaagaaagtcctgctggacttgatggtcaagacaggagtcccattgacgatgagcctgagcttaaccgttcttcccctaaaggcagcgagtcaccttga

SEQ ID NO: 108 - protein, 291 aa, Brassica napus
MPRFDDRYGNTRLYVGRLSSRTRTRDLERLFSRYGRVRDVDMKRDYAFVEFSDPRDADDARHYLDGRDFDGSRITVEASRGAPRGSRDARDNGSRGPPPGSGRCFNCGVDGHWARDCTAGDWKNKCYRCGERGHIERNCKNSASPKKARGGGSYSRSPVKSRSPRRRRSPSRSRSYSRGRSYSRSRSPVRRERSVEDRSLSPKAMERSVSPRGKDQSMSPERRVVDASPKREKQDGSDYEGSPKENGNGKSSVSPIVGGEESPAGLDGQDRSPIDDEPELNRSSPKGSESP

SEQ ID NO: 109 - DNA, 882 bp, Brassica napus
atgcctaggtatgatgatcgttacgggaacactcgtctgtacgttggacacttatcatccagaactcgtaccagagaccttgaacgccttttcaacagatacggaagagtgcgagatgtggatatgaagcgggattatgcctttgttgaatttagtgatccccgtgatgctgatgacgcgagacattacttggatggaagagactttgacggaagtcgcatcacagtggagttttcaagaggggcacctcgtggctctcgggattatgacagcagaggcccacctcctggatcaggtcgctgctttaactgtggtcttgacggtcattgggctcgagactgcactgcaggagactggaagaacaagtgttaccgctgtggtgaaagaggacacattgagagaaactgcaaaaacagtcccaagaagctcaggcggagtggaagctactccaggtcacctgtaagatcccgttctcctcgtcgtagaagaagcccgagccgtagcaggagtcttagccgtagccggagctacagccgatcaagatcccctgtgaaaagaagagagagaagtgaagaggagaggtctcgcagtccgaagagaatggaggactctctatcgccaagaggcagagaccgtagtccgattatggatgatgaaggtagcccaaggatcatagacgggagccctccaccttctccaaagcttgaaaagccagcaggatcagaccatgatggtggtagcagccctcaagacaatggtaatggaagaaacactgttgccagtcctgctgtgggacgtgacagtccgagagaagaccggagccccgttgatgatgattacgaggccaaccgtgcttcacctagaggaagcgagtctccttga

SEQ ID NO: 110 - protein, 293 aa, Brassica napus
MPRYDDRYGNTRLYVGHLSSRTRTRDLERLFNRYGRVRDVDMKRDYAFVEFSDPRDADDARHYLDGRDFDGSRITVEFSRGAPRGSRDYDSRGPPPGSGRCFNCGLDGHWARDCTAGDWKNKCYRCGERGHIERNCKNSPKKLRRSGSYSRSPVRSRSPRRRRSPSRSRSLSRSRSYSRSRSPVKRRERSEEERSRSPKRMEDSLSPRGRDRSPIMDDEGSPRIIDGSPPPSPKLEKPAGSDHDGGSSPQDNGNGRNTVASPAVGRDSPREDRSPVDDDYEANRASPRGSESP

SEQ ID NO: 111 - DNA, 882 bp, Panicum virgatum
atgccccgctacgatgaccggtacggtgggaacacaaggctgtacgtgggtcgtatctcctctcgtacaaggacagaggaccttgaagacattttcagcagatatgggagagtgcgttatgtggatatgaagcatgagttcgcatttgttgagtttagcgatgcccgggatgctgatgatgcaaggtacaaccttgatggtcgggatatcgatggaagccgcataattgttgagtttgctaaaggggttccgcgtggcccaggaggatcccgtgaatatatgggcaggggaccacctccaggttctggccgctgctttaactgtggtattgatgggcactgggctcgtgactgcaaagctggtgactggaaaaacaggtgctaccgctgcggagataggggccacatagaaagagactgtcggaatagccctaagagtctcaggcgtggaagaagttactcaagatccccatcccctcatcgtggaaggagccgtgataggagttacagcaggagccgcagtaggagctacagccgctcccaatctccaaagagggatacccgtgacgaaaggcgatcaatgagccctcgcgacagccgcagcccaaggaggagccctcgtgacagccgcagcccaaggaggagccctcgcgacagccgcagcccaaggaggagcccttcaccatctaaggggaggggccgcagccccagcaggagtcctgcaccaagggaacgcaatggctcagatcacagcatgagcccaaggagagctgacagcggtagcccagcagatcacgagcgccgtggtcgtagcccaagccccagggagtacaaagaaaatggcaaccagcgcatttcgcctagaggaagtgcatccccctga

SEQ ID NO: 112 - protein, 293 aa, Panicum virgatum
MPRYDDRYGGNTRLYVGRISSRTRTEDLEDIFSRYGRVRYVDMKHEFAFVEFSDARDADDARYNLDGRDIDGSRIIVEFAKGVPRGPGGSREYMGRGPPPGSGRCFNCGIDGHWARDCKAGDWKNRCYRCGDRGHIERDCRNSPKSLRRGRSYSRSPSPHRGRSRDRSYSRSRSRSYSRSQSPKRDTRDERRSMSPRDSRSPRRSPRDSRSPRRSPRDSRSPRRSPSPSKGRGRSPSRSPAPRERNGSDHSMSPRRADSGSPADHERRGRSPSPREYKENGNQRISPRGSASP

SEQ ID NO: 113 - DNA, 882 bp, Populus trichocarpa
atgccgcgatatgatgatcgatatgccagtacgcgtctctatgttggacacctggctgctaggacacgatcacgggatctggaacatcttttcagcaaatatgggcgagtacgagatgtggatatgaagcgtgactatgcatttgttgaatttagtgatcccagagatgctgatgatgcaaggcattacttagatggcaaggagtttgatggaagtcgtatcattgtggaatttgcaaagggggtacctcgtggttctcgagaatatttgggcagaggtcctcctccaggatctggacgctgctttaattgtggcattgatggccactgggctcgagattgcaaagctggagactggaagaacaagtgttatcgttgtggggaaagaggtcatatagagagaaactgcaagaacagtcccaagaaactcacgcggggaaagagttactctcgatcaccaggtagatcacgctctcctcaccgtggcagaagccgcagcccaagttatagccgaggtcgaagctacagccgatcaagatccccaccaccgaagagagagcgaagtgttgagaatgagaacaggtcattgagccctgaaccaaagagtacaaaggccaggaagcgcagcccaacacctgatgaaggcagcccacgcccttctcccaaatctcgaaaactggatgatgagcaagatagagagtacagtggcagccccacgggaagaagcagaagcagaagcagaagccctcgagatgagaggtatagaagtcctcagactaatggtcgcagccgcattcccagtcccagggatgatagaagccccgttgatgatgattatgaggacaacaaccgctccccgagagatagtgacgtgtcacgttga

SEQ ID NO: 114 - protein, 293 aa, Populus trichocarpa
MPRYDDRYASTRLYVGHLAARTRSRDLEHLFSKYGRVRDVDMKRDYAFVEFSDPRDADDARHYLDGKEFDGSRIIVEFAKGVPRGSREYLGRGPPPGSGRCFNCGIDGHWARDCKAGDWKNKCYRCGERGHIERNCKNSPKKLTRGKSYSRSPGRSRSPHRGRSRSPSYSRGRSYSRSRSPPPKRERSVENENRSLSPEPKSTKARKRSPTPDEGSPRPSPKSRKLDDEQDREYSGSPTGRSRSRSRSPRDERYRSPQTNGRSRIPSPRDDRSPVDDDYEDNNRSPRDSDVSR

SEQ ID NO: 115 - DNA, 882 bp, Vitis vinifera
atgaaattgttccaccaatgcagtttgaaaatgcctcgttatgatgatcgatatggtaatacacgtctttatgttggtcgcttgtcttcaagaacacgtacacgtgatctagagagcctcttcagcagatacgggagagtacgagatgtggatatgaagcacgacttcgcctttgttgaattcagtgatccccgagatgctgatgatgcaagatataacttaaatggacgagattttgatggaagtcgtatcattgtggaatttgcgaaagggggaccccgtggtggatcaggtggttctcgagaatatctaggtcgaggtcctccgcctgggtctggacgctgcttcaattgtggcattgatggccactgggctcgagattgcaaagctggagactggaagaataagtgttatcggtgtggagaaagaggtcatattgaaagaaactgccagaacagtcccaggaagctcagccgacatggacggagttactcacgatctccagttagatctcgccatggcaggagccggagccgaagttatagcccaagtcgcagttacagccgatcgagatctcctccaaagagagatcgaagcattgagcgagacaagaggtcagggagccctcgtacacctacatccaaaccaaggaagcgcagcccaacgcctgaagacagcaggcctcaagaaagaatcagccctaatgtttataaaagagaacagccagagtacagccaaagccccagggagaagagcagaagccctgttagaggtaccgaagcccttctgatgctaatgggcgaagtcgcagccagaaggagtcctctagatgaagatgaagataataacagtcgctccccaagaggtagtgaatccccttga

SEQ ID NO: 116 - protein, 293 aa, Vitis vinifera
MKLFHQCSLKMPRYDDRYGNTRLYVGRLSSRTRTRDLESLFSRYGRVRDVDMKHDFAFVEFSDPRDADDARYNLNGRDFDGSRIIVEFAKGGPRGGSGGSREYLGRGPPPGSGRCFNCGIDGHWARDCKAGDWKNKCYRCGERGHIERNCQNSPRKLSRHGRSYSRSPVRSRHGRSRSRSYSPSRSYSRSRSPPKRDRSIERDKRSGSPRTPTSKPRKRSPTPEDSRPQERISPNVYKREQPEYSQSPREKSRSPVRGTEALLMLMGEVAARRSPLDEDEDNNSRSPRGSESP

SEQ ID NO: 117 - DNA, 885 bp, Citrus clementina
tccctcggtgggggtgtgtgccaccaaaccacccccccaaaagaaaaagaggcggaaaaaaaaaaaaagtttttttttttttgagaaattttttggggtttgtttttttcttttttttaaccactataaaggggaacaataaaaaaaaaataaaaaaaaaaaaaatcttttttttttttttttttgtgggtgggggggggggggggggaggtttttttaaaaaaaaaaaacccttcaaaaattggtgttggggtttttattattaaaaccaacctgggggagggggggggcccaaaagaaaccccggggggttatatttaaaaaaacaaaaaaaaaaaaaacccaccccccgggttaaaaaatttttaaatttttttccgaaacacaatttcccaagccccaagaaagcgggggtttttaccccttttccctctaaaaaatttttttttcccctcaacccctaaaattctgttgtggttttttcccaattttttccccccccaaaaaaaaggttttttccaaaaaaatcccaaagaacaattttccccccccccgagtttaaaaaaaggggccccccccttgttttttttataccccctttaaggggcccctttttccaaaaaaaaggggggggggaaaattgggcccccccgggggaaattttaagggggccccccccttttttttttttttttttttttttttttttttttttttttttttttttttttttttttttttttgggtttttttttttttttttttttttttttttttttttttttttttttttttttttttttgcaaataaaccaacatgaatttacgaacagttccaacataataaaaaattaaaatctcaagcaagttcataaaaatattcaa

SEQ ID NO: 118 - protein, 294 aa, Citrus clementina
MPRYDDRYGGTRLYVGRLASRTRSRDLEEIFSRYGRIRDVDMKRDFAFVEFSDPRDADDARYSLNGRDVDGSRIIVEFARGGPRGPGGSREYLGRGPPPGSGRCFNCGIDGHWARDCKAGDWKNKCYRCGERGHIERNCQNSPKKLRRPRSYSRSPSPRRGRSRSRSYSRGRSDSRSRSPVKRDRSVERFERRTRSPRDSRSPKRRRNSPPSSKGRKRSPTPDERSPQDQRSPSPRDRRQANGSEYSGSPRGKSRSPVDDAEGPEDRNYRSPPEENGAAEAAALVQSLGMIGAH

SEQ ID NO: 119 - DNA, 888 bp, Brassica napus
atgcctcgctacgatgatcgttacagcagcaatgaccgatacggtggtgcgcgtctctatgttggccacctctcctctcgaacaagggaacgtgatcttgaacacctcttcagcaaatacggaagaattcgagatttggacatgaagcgagactatgccttcattgagttcagcgatcctagagatgcggatgatgcgaggtacaggttggacggaagagactttgatggaagccgtatcactgtggagtttgccagagggacacctcgtggttcccgtgacttttcctcgagcagaggccctcctcccccagggagtggtcgttgcttcaactgtggtctcgaaggacactgggctcgtgattgctctgctggtgactggaagaacaaatgttatcgatgtggagataggggtcacattgagaggaactgcaagaacagtcctaagaagctcaggcgggacgcaagttactcaagatcgccggttaggtctcggtctaggtctcctcctcgtcgcagaagaagaagccccagcagaagctatagccgtgaccgtagctacagtcgctccagatctccggttaggaaggaaacggatcgtagccctgaagctgcaaggagcagaagccctgaagctgctagaagcagaagccctgaagctgcaaggagcagaagccctgaactaatggtggacaactctcctccatcaaaagataggaagcgaagtttgactcctgaagaaggcagtccaatgcgtgagaagaacagccccaaggagaatgaattgagcccgagaggaaacgatggtggaggtattggaaccaatgagcaagaccgaagccatagtcccagagaagaccgtagccctgtggaggatgatgaccagtga

SEQ ID NO: 120 - protein, 295 aa, Brassica napus
MPRYDDRYSSNDRYGGARLYVGHLSSRTRERDLEHLFSKYGRIRDLDMKRDYAFIEFSDPRDADDARYRLDGRDFDGSRITVEFARGTPRGSRDFSSSRGPPPPGSGRCFNCGLEGHWARDCSAGDWKNKCYRCGDRGHIERNCKNSPKKLRRDASYSRSPVRSRSRSPPRRRRRSPSRSYSRDRSYSRSRSPVRKETDRSPEAARSRSPEAARSRSPEAARSRSPELMVDNSPPSKDRKRSLTPEEGSPMREKNSPKENELSPRGNDGGGIGTNEQDRSHSPREDRSPVEDDDQ

SEQ ID NO: 121 - DNA, 888 bp, Brassica rapa
atgcctaggtatgatgatcgttacgggaacactcgtctgtacgttggacacttatcatccagaactcgtaccagagaccttgaacgccttttcaacagatacggaagagtgcgagatgtggatatgaagcgggattatgcctttgttgaatttagtgatcctcgtgatgctgatgatgcgagacattacttggatggacgagactttgatgggagtcgcatcacagtggagttttcaagaggggcacctcgtggctctcgggattatgacagcagaggcccacctcctggatcaggtcgctgctttaactgtggtcttgacggtcattgggctcgagactgcactgcaggagactggaagaacaagtgttaccgctgtggtgaaagaggacacattgagagaaactgcaaaaacagtcccaagaagctcaggcggagtggaagctactccaggtcacctgtaagatcccgttctcctcgtcgtagaagaagcccaagccgtagcaggagccttagccgtagccgaagctacagccgctcaagatcccctgtgaaaagaagagagagaagtgcagaggagagatctcgcagtccaaagagaatggaggactctctatcgccaagaggcagagaccgtagtccgattatggatgatgaaggtagcccaaggatcatagacgggacccctccaccttctccaaagcttgaaaagccagcaggatcagaccatgatggtggtagcagccctcaagacaatggtaatggaagaaacactgttgccagtcctgctgtgggacgcagtgccgacagtccgagagaagaccggagccccgttgatgatgattacgaggccaaccgtgcttcacctagaggaagcgagtctccttga

SEQ ID NO: 122 - protein, 295 aa, Brassica rapa
MPRYDDRYGNTRLYVGHLSSRTRTRDLERLFNRYGRVRDVDMKRDYAFVEFSDPRDADDARHYLDGRDFDGSRITVEFSRGAPRGSRDYDSRGPPPGSGRCFNCGLDGHWARDCTAGDWKNKCYRCGERGHIERNCKNSPKKLRRSGSYSRSPVRSRSPRRRRSPSRSRSLSRSRSYSRSRSPVKRRERSAEERSRSPKRMEDSLSPRGRDRSPIMDDEGSPRIIDGTPPPSPKLEKPAGSDHDGGSSPQDNGNGRNTVASPAVGRSADSPREDRSPVDDDYEANRASPRGSESP

SEQ ID NO: 123 - DNA, 891 bp, Citrus clementina
atgcctcgttatgatgaccggtacggtggtacgcgtctctatgttggacgcttggcttcacggacaagatcacgtgatcttgaggagatcttcagcagatatgggagaattcgcgatgtggatatgaagcgtgacttcgcctttgttgaatttagcgaccctcgtgatgctgacgatgcaagatatagcttaaatggtcgggatgttgatggaagccgtatcattgtggaatttgcaagaggggggccacgtggtcctggtggatctcgtgagtatcttggtcgaggccctcctcctggatctgggcgctgcttcaattgtgggattgatggccattgggctcgagactgcaaggctggagactggaagaataagtgttatcgctgtggtgaacgaggccacatagaacgaaattgtcaaaacagtccaaagaagttaaggaggcctcggagttattcacgttctccaagtcctcgtcgtggtagaagcaggagccgtagttacagtagaggccgcagcgacagccgatcacgatcgcctgtcaagagagataggagtgttgaacgttttgagagaagaacaaggagcccccgagacagtaggagccctaagcgtcgcagaaattcaccaccatcatctaaaggtaggaagcgtagtccaaccccagatgaaagaagtccacaagatccacgtagcccatccccaagggaccggaggcaggctaatggatcaaaatacagtggcattccaaggggaaaaaagcaaaaccctgtaaacgatggccatggccctgaagaaaaggattacaggagccctcccaaaaaaatggccggcacccaaaccccaccccccaccttaatccattccctagggaagaaagaacccctttga

SEQ ID NO: 124 - protein, 296 aa, Citrus clementina
MPRYDDRYGGTRLYVGRLASRTRSRDLEEIFSRYGRIRDVDMKRDFAFVEFSDPRDADDARYSLNGRDVDGSRIIVEFARGGPRGPGGSREYLGRGPPPGSGRCFNCGIDGHWARDCKAGDWKNKCYRCGERGHIERNCQNSPKKLRRPRSYSRSPSPRRGRSRSRSYSRGRSDSRSRSPVKRDRSVERFERRTRSPRDSRSPKRRRNSPPSSKGRKRSPTPDERSPQDPRSPSPRDRRQANGSKYSGIPRGKKQNPVNDGHGPEEKDYRSPPKKMAGTQTPPPTLIHSLGKKEPL

SEQ ID NO: 125 - DNA, 891 bp, Phaseolus vulgaris
atgcctcgctatgatgataagtatggaaatacccgcctgtatgtgggtcgtttgtctttggatactcgttcccgtgatctggagcgtgtcttcggcagatatggaagagttcgaggtgtggatatgaagaatgatttcgcctttgttgaatttagcgatcctcgagatgctgatgaagctagatataacttggatggtcgtgacgttgaaggaagtcgtattattgtggagtttgccaaggggggtcctcgtggttcccgggaatacatgggtcggggtccaccgcctggatctggacgatgctttaactgtggcattgatggtcattgggctcgtgattgcaaagctggggattggaagaataagtgttaccgctgtggggaaagaggtcatatagagaagaactgcaagaacagtcccaaaaaactgagcagcagacgtggacgcagtcgttctcgatcacctgtgaggtcacgttctcctcgtcgtgggagaagcagggatagaagctacagccgtgaccgaagctacagtcgatcgagatctcctcctgttaggagagaacgtagcccagtttctgaagatagatcacggagtcctcagccgtccaaaataaggaggcatagtgcatcgcctgaccgaggcagcccccagaagggaggtgtcagatctcctggtaatgataggttggtcaatcagcgagatgggtctgaatacagtgatggttcaagagggaaaagtagaagccctgcaagggaccgtaatgtgcggggctatgatagccctaaagctaatggacgtagtggcagtcccagccgtagtcctagggatgatgacaggagccccattgatgaagatgatgacaaccaccgccgctcacagtcaccttag

SEQ ID NO: 126 - protein, 296 aa, Phaseolus vulgaris
MPRYDDKYGNTRLYVGRLSLDTRSRDLERVFGRYGRVRGVDMKNDFAFVEFSDPRDADEARYNLDGRDVEGSRIIVEFAKGGPRGSREYMGRGPPPGSGRCFNCGIDGHWARDCKAGDWKNKCYRCGERGHIEKNCKNSPKKLSSRRGRSRSRSPVRSRSPRRGRSRDRSYSRDRSYSRSRSPPVRRERSPVSEDRSRSPQPSKIRRHSASPDRGSPQKGGVRSPGNDRLVNQRDGSEYSDGSRGKSRSPARDRNVRGYDSPKANGRSGSPSRSPRDDDRSPIDEDDDNHRRSQSP

SEQ ID NO: 127 - DNA, 891 bp, Sorghum bicolor
atgccccgctacgacgatcgttacaatgatcgttacgatgaccgttacgatgatcgttacggtgggaacacacggctgtatgtgggtcgtgtctcttcccgtacaaggacacgggatcttgaagaccttttcggcagatatgggagagtgcgttatgtggatatgaagcatgagtttgcgtttgttgagttcagtgatccccgagatgctgatgatgcaaggtatcaccttgatgatagggagttcgatggtagccgattgattgttgagtttgcaaaagggattccacgtggtccaggaggatcccgtgaatatatgggcaagggaccgcctcctggttctggccgctgctttaactgtggtatggatgggcactgggctcgtgactgcaaagctggtgactggaaaaacagatgctaccgctgtggagataggggccatatagaaagagactgtcaaaacagccctaagaacctgaggcgtggaagaagttactcaagatccccatcccctcgtcgtgaaaggagccctgttaggagttacagcaggagccgcagtaggggctatagccgttcacgatctccaaggcagaacagccgtgatgaaaggagccctcgtgacagccgcagcccaaggaggagccctcgcgatagccgcagcccaaggaggagcccctcactgtccaagggaagagaccgcagccccagccctaatggtagcaggagccctgcaccaagggaacgcaatggctcagattacagcatgagccctaggagggatgacagccgtagtccagcagaccacctgcgccgtgagatcagtccagcagccaatggtcgtagccctagcccaggggtcaatgataatggcaatcaccgctcatctccctga

SEQ ID NO: 128 - protein, 296 aa, Sorghum bicolor
MPRYDDRYNDRYDDRYDDRYGGNTRLYVGRVSSRTRTRDLEDLFGRYGRVRYVDMKHEFAFVEFSDPRDADDARYHLDDREFDGSRLIVEFAKGIPRGPGGSREYMGKGPPPGSGRCFNCGMDGHWARDCKAGDWKNRCYRCGDRGHIERDCQNSPKNLRRGRSYSRSPSPRRERSPVRSYSRSRSRGYSRSRSPRQNSRDERSPRDSRSPRRSPRDSRSPRRSPSLSKGRDRSPSPNGSRSPAPRERNGSDYSMSPRRDDSRSPADHLRREISPAANGRSPSPGVNDNGNHRSSP

SEQ ID NO: 129 - DNA, 894 bp, Coffea canephora
atgcctcgctatgatgatcgccatggtgttacaaggctctatgttggccgcctttcttcaaggacccgttcacgtgacctggaggatctatttagcagatatggaagagtacgtgatgtggacatgaagcgtgattatgcctttgtggaatttagtgatcctagagatgctgatgatgcaagatatagcatgaatggccgggaagtagatggaagtcgtattattgtggaatttgcaaagggggtaccacgtggtcctggtggctcccgtgatcgtgattatcttggcaagggtccagctcctggaactgggcgctgctttaattgtggaatcgatggccattgggctcgagattgcaaagctggggactggaagaacaagtgctatcgatgtggtgaacgaggccatatagaaaggaactgtcaaaacagcccccaaaagctaaaacgcgggcgcagttattctcgatcaccatctcctcctcgtcgtggcaggagtccaagccgtagttacagcaggagcagaagctacagccgatcgaggtctccaccaaggagggatcgtagcaacgagcgtgaggagaaaagatctaggagccctaagcgtcacagggtatcatctccaccaccatccaaagggaggaagcacagcccaacacctgatgagagaagcccccgagagagggccactccttcaccaagggatggtaggccagccaatgactcagagtatagtagaagccctaaagatgatgctccaagggatgatggtatcaaagataggagtcctcttgaagaaaatggccgtagccgaagtcctagccccatccgtagggacaatggaagccccgctgataatgatgaaaccaatggttcaccaaggggcagtgagtga

SEQ ID NO: 130 - protein, 297 aa, Coffea canephora
MPRYDDRHGVTRLYVGRLSSRTRSRDLEDLFSRYGRVRDVDMKRDYAFVEFSDPRDADDARYSMNGREVDGSRIIVEFAKGVPRGPGGSRDRDYLGKGPAPGTGRCFNCGIDGHWARDCKAGDWKNKCYRCGERGHIERNCQNSPQKLKRGRSYSRSPSPPRRGRSPSRSYSRSRSYSRSRSPPRRDRSNEREEKRSRSPKRHRVSSPPPSKGRKHSPTPDERSPRERATPSPRDGRPANDSEYSRSPKDDAPRDDGIKDRSPLEENGRSRSPSPIRRDNGSPADNDETNGSPRGSE

SEQ ID NO: 131 - DNA, 894 bp, Glycine max
atgcctcgctatgatgataaatatggtaatacccgcctctatgttggacgcttgtcttcgaggacacgttcccgtgacctggagcgtgtcttcagcagatatggaagaattcgaggtgtagatatgaagaatgattttgcctttgttgaatttagcgatcctcgggatgctgatgatgctagatatagcttggatggtcgtgatgttgaaggaagtcgtatcattgtggaatttgccaaggggggtcctcgtggttcccgggaaaacttgggtcggggtctacctcctggatctggacgatgctttaactgtggcattgatggtcattgggcccgagattgcaaagctggggattggaagaacaagtgttaccgttgtggggaaagaggtcatatagaaaagaactgtaagaacagtcccaaaaagtcgagccgacatggacggagtctttcacgttcaccggtccggtcacattctcctcgtcgtggcagaagccgggatcgaagctacagccgagaccgcaactacagccgatcgagatctccagtcagaagagaacgaagcccagtttctgaagatagatcacagagtcctgagccctccaagataaggaagcatagcacatcacctgatcaaagcagcccacggaagagaggtgacccggctcctggcaatgataggttggccactctgcaagatgggtctgactacagtgatggtcctagagggaaaagtagaagccctgctagccctgcaagggaccatgatgagggcaactatgatagccctaaagctagtgggcgtagccacagccccagcaggagccctagggaagatgacaggagccccattgatgaagatgatgacaacaaccgtcgctcagggtcaccttga

SEQ ID NO: 132 - protein, 297 aa, Glycine max
MPRYDDKYGNTRLYVGRLSSRTRSRDLERVFSRYGRIRGVDMKNDFAFVEFSDPRDADDARYSLDGRDVEGSRIIVEFAKGGPRGSRENLGRGLPPGSGRCFNCGIDGHWARDCKAGDWKNKCYRCGERGHIEKNCKNSPKKSSRHGRSLSRSPVRSHSPRRGRSRDRSYSRDRNYSRSRSPVRRERSPVSEDRSQSPEPSKIRKHSTSPDQSSPRKRGDPAPGNDRLATLQDGSDYSDGPRGKSRSPASPARDHDEGNYDSPKASGRSHSPSRSPREDDRSPIDEDDDNNRRSGSP

SEQ ID NO: 133 - DNA, 894 bp, Glycine max
atgcctcgctatgatgataaatatggtaatacccgcctctatgttggacgcttgtcttcgaggacacgttcccgtgacctggagcgtgtcttcagcagatatggaagaattcgaggtgtagatatgaagaatgattttgcctttgttgaatttagcgatcctcgggatgctgatgatgctagatatagcttggatggtcgtgatgttgaaggaagtcgtatcattgtggaatttgtcaaggggggtcctcgtggttcccgggaaaacttgggtcggggtctacctcctggatctggacgatgctttaactgtggcattgatggtcattgggcccgagattgcaaagctggggattggaagaacaagtgttaccgttgtggggaaagaggtcatatagaaaagaactgtaagaacagtcccaaaaagtcgagccgacatggacggagtctttcacgttcaccggtccggtcacattctcctcgtcgtggcagaagccgggatcgaagctacagccgagaccgcaactacagccgatcgagatctccagtcagaagagaacgaagcccagtttctgaagatagatcacagagtcctgagccctccaagataaggaagcatagcacatcacctgatcaaagcagcccacggaagagaggtgacccggctcctggcaatgataggttggccactctgcaagatgggtctgactacagtgatggtcctagagggaaaagtagaagccctgctagccctgcaagggaccatgatgagggcaactatgatagccctaaagctagtgggcgtagccacagccccagcaggagccctagggaagatgacaggagccccattgatgaagatgatgacaacaaccgtcgctcagggtcaccttga

SEQ ID NO: 134 - protein, 297 aa, Glycine max
MPRYDDKYGNTRLYVGRLSSRTRSRDLERVFSRYGRIRGVDMKNDFAFVEFSDPRDADDARYSLDGRDVEGSRIIVEFVKGGPRGSRENLGRGLPPGSGRCFNCGIDGHWARDCKAGDWKNKCYRCGERGHIEKNCKNSPKKSSRHGRSLSRSPVRSHSPRRGRSRDRSYSRDRNYSRSRSPVRRERSPVSEDRSQSPEPSKIRKHSTSPDQSSPRKRGDPAPGNDRLATLQDGSDYSDGPRGKSRSPASPARDHDEGNYDSPKASGRSHSPSRSPREDDRSPIDEDDDNNRRSGSP

SEQ ID NO: 135 - DNA, 900 bp, Glycine max
atgcctcgctatgatgataaatatggtaatacccgcctctatgttggacgcttgtcttcgaggactcgttcccgtgacctggagcgtgtcttcagcagatatggaagagttcgaggcgtagatatgaagaatgatttcgcctttgttgaatttagtgatcctcgagatgctgatgatgctagatacaacctggatggtcgtgatgttgaaggaagtcgtattattgtggaatttgccaaggggggtcctcgtggttcccgggaccgggaatatatgggtcggggtccacctcctggatctgggcgatgctttaactgtggcattgatggtcattgggcccgagattgcaaagccggggattggaagaacaagtgttaccgttgtggggaaagaggtcatatagaaaagaactgtaagaacagtcccaaaaagttgagccaacgtggacggagtctttcacgttcaccagtaaggtcacgttctcctcgtcgtggaagaagcagggatcgaagctacagccgagaccacagctacagccgatcgagatctcctgtcagaagagaacgaagcccagtttctgaagatagatcacagagtcctgagccctccaagataaggaagcatagcacatcacctgatcaaagcagcccacggaagagaggtgacacatctcctggcaatgataggttggccactcatcaagatgggtctgactacagtgatggtcctagagggaaaagtagaagccctgctagccctgcaagggaccgtgatgagggcaactatgatagccctaaagctaatggacatagccgcagccccagccggagccctagggatgatgacaggagccccattgatgaagatgatgacaaccaccgtcgctcacagtcaccttga

SEQ ID NO: 136 - protein, 299 aa, Glycine max
MPRYDDKYGNTRLYVGRLSSRTRSRDLERVFSRYGRVRGVDMKNDFAFVEFSDPRDADDARYNLDGRDVEGSRIIVEFAKGGPRGSRDREYMGRGPPPGSGRCFNCGIDGHWARDCKAGDWKNKCYRCGERGHIEKNCKNSPKKLSQRGRSLSRSPVRSRSPRRGRSRDRSYSRDHSYSRSRSPVRRERSPVSEDRSQSPEPSKIRKHSTSPDQSSPRKRGDTSPGNDRLATHQDGSDYSDGPRGKSRSPASPARDRDEGNYDSPKANGHSRSPSRSPRDDDRSPIDEDDDNHRRSQSP

SEQ ID NO: 137 - DNA, 900 bp, Glycine max
atgcctcgctatgatgataaatatggtaatacccgcctctatgttggacggttgtcttcgaggactcgttcccgtgacctggagcgtgtcttcagcagatatggaagagttcgaggcgtagatatgaagaatgatttcgcctttgttgaatttagtgatcctcgagatgctgatgatgctagatacaacctggatggtcgtgatgttgaaggaagtcgtattattgtggaatttgccaaggggggtcctcgtggttcccgggaccgggaatatatgggtcggggtccacctcctggatctgggcgatgctttaactgtggcattgatggtcattgggcccgagattgcaaagccggggattggaagaacaagtgttaccgttgtggggaaagaggtcatatagaaaagaactgtaagaacagtcccaaaaagttgagccaacgtggacggagtctttcacgttcaccagtaaggtcacgttctcctcgtcgtggaagaagcagggatcgaagctacagccgagaccacagctacagccgatcgagatctcctgtcagaagagaacgaagcccagtttctgaagatagatcacagagtcgtgagccctccaagataaggaagcatagtgcatcacctgaccaaagcagcccacggaagagaggtgacacatctcctggcaatgataggttggccactcatcaagatgggtctgactacagtgatggtcctagagggaaaagtagaagccctgctagccctgcaagggaccgtgatgagggtggctatgatagccctaaagctaatggacatagccgcagccccagccggagccctagggatgatgacaggagccccattgatgaagatgatgacaaccaccgtcgctcacagtcaccttga

SEQ ID NO: 138 - protein, 299 aa, Glycine max
MPRYDDKYGNTRLYVGRLSSRTRSRDLERVFSRYGRVRGVDMKNDFAFVEFSDPRDADDARYNLDGRDVEGSRIIVEFAKGGPRGSRDREYMGRGPPPGSGRCFNCGIDGHWARDCKAGDWKNKCYRCGERGHIEKNCKNSPKKLSQRGRSLSRSPVRSRSPRRGRSRDRSYSRDHSYSRSRSPVRRERSPVSEDRSQSREPSKIRKHSASPDQSSPRKRGDTSPGNDRLATHQDGSDYSDGPRGKSRSPASPARDRDEGGYDSPKANGHSRSPSRSPRDDDRSPIDEDDDNHRRSQSP

SEQ ID NO: 139 - DNA, 900 bp, Ipomoea batatas
atgccgcgatatgatgatcgttacggtggatcccgcctctatgttggtcacctctcttccaggacgcggtctcgtgatttggaggacatctttgccaaatacgggagagtacgagatgtggatatgaagcgtgactatgcatttgtggaatatagtgatcctcgagatgctgacgatgctatatataggctaaatggtcgggaagttgatgggagtcgcatcattgtggagattgccaagggggtgccacgtgggcctggtggatctcgtgagtattctggccgtggtcctgctccaggaacagggcgttgcttcaattgtggaattgaaggccactgggctcgcgattgcaaggctggagactggaagaacaaatgttatcgttgtggggagcgaggtcatatagaaagaaattgtcctgacagtcccaaaaagaatagtggacgtggtcggagttattctcgatcaccatctccacgccgtggcaggaaccgaagccgtagttatagcaggggtcgtagttacagccgatccagatcacctgcaaagagagagcgcagcattgatcacgaggagagacgatctaggagtcccaggcatcgcaaatcttccccaccaccatcaaaaggaagacagcatagccccacacctgatgaaaggagcccgcgtgaaagaggcacaccatccccactggacaatagaccagtgaatggttcagaatatgaccgaagccccaaggatggaactgaaacagacgaccgaagatatgatgatgaaaagaacatgagccctcttgaagaaaatgatcgcagtcgcagcaatagccctatccccagggacaatgaaagccccatagaaaatgataagcgtggctctccaagaggcagcgagtcaccttaa

SEQ ID NO: 140 - protein, 299 aa, Ipomoea batatas
MPRYDDRYGGSRLYVGHLSSRTRSRDLEDIFAKYGRVRDVDMKRDYAFVEYSDPRDADDAIYRLNGREVDGSRIIVEIAKGVPRGPGGSREYSGRGPAPGTGRCFNCGIEGHWARDCKAGDWKNKCYRCGERGHIERNCPDSPKKNSGRGRSYSRSPSPRRGRNRSRSYSRGRSYSRSRSPAKRERSIDHEERRSRSPRHRKSSPPPSKGRQHSPTPDERSPRERGTPSPLDNRPVNGSEYDRSPKDGTETDDRRYDDEKNMSPLEENDRSRSNSPIPRDNESPIENDKRGSPRGSESP

SEQ ID NO: 141 - DNA, 903 bp, Ananas comosus
atgccccgccacgacgaccgatatggcacgcgtttgtatgtcggccgactctcgtctcgtactcgatccagggaccttgaagaccttttcagcaaatatggaagagtacgatatgtggatatgaagcacgactttgccttcgttgaattcagtgattctcgtgatgctgatgatgcaagatacagcctgcatggtcgtgaatttgatggaagccgtattattgtggaatttgctagggggggtccacgtggcccaggaggttcacgtgaatatctgggaagagggccgccacctggaaccgggcgttgctttaattgtggtattgatggccactgggctcgtgattgcaaagccggggactggaaaaacaagtgctatcgctgtggagaaagaggccatatagaaagaaactgccagaatagtccaaagaatctctcgaggcgtgagaggagtgggaggagttactcacgatcgccatctcctcgtcgtggtaggagccgaagtcgtagctacagcagaagtcgtagttacagtcgatcccgatctccaaagcgagatggtcgtggtgcagaacgcgatgagtggcgatcaaggagccgcagttacagccggagcccaaagaggagccctgcgccatccaagggaaggaagcgcagcctctcccctaacggcagccggagcccgccacctcaggaccggactgaccgcaacggatctgactacagccagagcccgaggaggagggatgacagccggagcccggctggccgggagagcgcaagcccggctgccgaaggccggaggtatcgaagccctgcggctaacgggcgtggccctagccctagggatgaggaggataatggcaaccaccgcacttcgcccagaggaagtgaatccccttga

SEQ ID NO: 142 - protein, 300 aa, Ananas comosus
MPRHDDRYGTRLYVGRLSSRTRSRDLEDLFSKYGRVRYVDMKHDFAFVEFSDSRDADDARYSLHGREFDGSRIIVEFARGGPRGPGGSREYLGRGPPPGTGRCFNCGIDGHWARDCKAGDWKNKCYRCGERGHIERNCQNSPKNLSRRERSGRSYSRSPSPRRGRSRSRSYSRSRSYSRSRSPKRDGRGAERDEWRSRSRSYSRSPKRSPAPSKGRKRSLSPNGSRSPPPQDRTDRNGSDYSQSPRRRDDSRSPAGRESASPAAEGRRYRSPAANGRGPSPRDEEDNGNHRTSPRGSESP

SEQ ID NO: 143 - DNA, 903 bp, Lotus japonicus
atgcctcgctatgatgataagtatggtaacacccgcctctatgtgggtcgcttgtcttccaggacgcgttcccgtgatctcgagcgagtcttcagcagatatggaagagttcgagacgtggatatgaagcgtgattatgcctttgttgaatttagcgatcctcgagatgctgatgatgcaagatataacttggatggacgtgatgttgatggaagtcgtcttattgttgaatttgcaaaaggggttccccgtggttctcgtgaagggggcgggggccgggaccgcgaccgggaatatatgggtcgtggtccacctcctggatctggacgctgctttaactgtggtattgatggccactgggctcgagattgcaaagctggggattggaagaacaagtgttatagatgtggagagagaggtcatatagaaaagaactgcaagaacagtcccaaaaagttgagtcgacaccctaggagtgattcacgttcaccagtcaggtcacgatctcctaggcgtggcaggagccgggatcgaagttacaccccagagcgcagctacagccgatcaagatccccagtcagaagagatcgaagcccttttcctgaagatcgatcaaggagtcctccctccaggacaaggaagcatagtctatctcctgacctagacagcccacagaagagaagtgatgcatctcctcctggcaatgataggttggccacaacccgagatggatctgactacagcgatgatgccagggcgaagagtagaagccccgcaagggaccttgatgatgatagccccaaagctgacaatgggcgtagccgcagtgctagccctagggatgatgataggagccccattgaagaagatgatgacaaccaccgtcaatctccgtcaccttag

SEQ ID NO: 144 - protein, 300 aa, Lotus japonicus
MPRYDDKYGNTRLYVGRLSSRTRSRDLERVFSRYGRVRDVDMKRDYAFVEFSDPRDADDARYNLDGRDVDGSRLIVEFAKGVPRGSREGGGGRDRDREYMGRGPPPGSGRCFNCGIDGHWARDCKAGDWKNKCYRCGERGHIEKNCKNSPKKLSRHPRSDSRSPVRSRSPRRGRSRDRSYTPERSYSRSRSPVRRDRSPFPEDRSRSPPSRTRKHSLSPDLDSPQKRSDASPPGNDRLATTRDGSDYSDDARAKSRSPARDLDDDSPKADNGRSRSASPRDDDRSPIEEDDDNHRQSPSP

SEQ ID NO: 145 - DNA, 909 bp, Nicotiana tabacum
atgccgcggtatgatgataggtatggtggtacacgcctctatgttggacatttgtcttccagaacgcgatctcgagacttggaggacgtctttagcagatacgggagagtacgtgatgtggatatgaagcgtgactatgcttttgtggaatttagtgatcctcgagatgctgatgatgcaagatacggcctaaatgggcgggacgttgatggaagccgtattactgtggaattcgcaaaaggggtacctcgtggtccaggtggatctcgagagtttggcggcagaggtcctcctccaggtacaggtcgttgctttaattgtggacttgatggccattgggctcgagattgtaaggctggggactggaagaacaagtgttaccgctgtggggagcgaggtcatatagaaagaaactgtcagaatagccccaagaaattgaaacgtggacgaagttattcccgctcaccgtctcctcgtcgtggcagaagtcgcagccgcagttacagcagaggtcgtagctacagccgatccaggtctcctgtgaggagggactccaggtctcctgtgaagagggaccaaagcattgagcatgaagagagaagatcaagtagtcctcgccctcgaagatcatcaccacctccatcaaaaggaaggaaatacagcccttcacctgatgaaagaagtccacaagagagaggtacgccgtcccctaagggtgatagggcagccaatggttccgagtatagcaggagccctacagacgatgctggaatagacgaacgcagaaatttgagccctattgaagaaaatggccgcagtcacagcaatagccccatccatagagagaacgggagcccaatgggtgatgatgaaaatcatggttctccaaggggcagcgagtcaccttaa

SEQ ID NO: 146 - protein, 302 aa, Nicotiana tabacum
MPRYDDRYGGTRLYVGHLSSRTRSRDLEDVFSRYGRVRDVDMKRDYAFVEFSDPRDADDARYGLNGRDVDGSRITVEFAKGVPRGPGGSREFGGRGPPPGTGRCFNCGLDGHWARDCKAGDWKNKCYRCGERGHIERNCQNSPKKLKRGRSYSRSPSPRRGRSRSRSYSRGRSYSRSRSPVRRDSRSPVKRDQSIEHEERRSSSPRPRRSSPPPSKGRKYSPSPDERSPQERGTPSPKGDRAANGSEYSRSPTDDAGIDERRNLSPIEENGRSHSNSPIHRENGSPMGDDENHGSPRGSESP

SEQ ID NO: 147 - DNA, 912 bp, Gossypium raimondii
atgcctaggtatgatgaccgccgcagtagtggtacacgcctttatgttggtcacttgtcttcgaggacaaggtcacgtgatcttgaggacatgtttaggagatatgggagaatacgtgatgtggatatgaagcgtgactatgcattcgttgaattcagtgaccctagagatgctgatgatgcaagatattcattgaatggtagagaccttgacggaagccgtatagttgttgaatttgccaagggggtgcctcgtggccctggtgggtctcgtgattaccctggaagaggtcctgctcctggagcagggcgctgcttcaactgtggaattgatggtcactgggctcgtgattgcaaagctggggattggaagaataagtgttatcgctgtggtgaacgaggccatatcgaaagaaattgtcaaaacagtccaaagaaactgagccgtcgacctcgcagttactcacgttcacctagtcctcgccgtggaagaagcagaagccgcagttatagtaggggacgtagcaacagtagatcgagaacacctgtgaagagagaacaaggtttcgagcgcgatgatagaagatcgaggagtcctaagtcccacaggggttctcctttgccacccagaggccggaagcatggtccaactctcgacgaaagaagcccacaagagggaggtagtccttcctcgagagatcggaggcacaccaatggctccaaatacagccccagggaaaggagccaaagcccagatcatgaagctgatgctgaggacagggcttataggagttccacaaaagaaaacggccagagtcatagccctagcccagtaccaagggaggatcggagcccgatttacaatgatgatgatgataataatcgggcttctagacgcagtgaatcaaattaa

SEQ ID NO: 148 - protein, 303 aa, Gossypium raimondii
MPRYDDRRSSGTRLYVGHLSSRTRSRDLEDMFRRYGRIRDVDMKRDYAFVEFSDPRDADDARYSLNGRDLDGSRIVVEFAKGVPRGPGGSRDYPGRGPAPGAGRCFNCGIDGHWARDCKAGDWKNKCYRCGERGHIERNCQNSPKKLSRRPRSYSRSPSPRRGRSRSRSYSRGRSNSRSRTPVKREQGFERDDRRSRSPKSHRGSPLPPRGRKHGPTLDERSPQEGGSPSSRDRRHTNGSKYSPRERSQSPDHEADAEDRAYRSSTKENGQSHSPSPVPREDRSPIYNDDDDNNRASRRSESN

SEQ ID NO: 149 - DNA, 915 bp, Asparagus officinalis
atgcctcgatatgacgatcgctacggcggcacaaggttgtatgttggtcatttgtcttcccgcactcgtacacgtgatcttgaagacctttttagcagatatggcagagtacgtgatgtggctttgaagcatgactacgcctttgttgaatacagtgatcctagagatgcagatgatgcaaggtacagcttaaacggaagggattttgatggaagtcgaatcattgtggaattcgctaaagggggtccacgaggctcaggagagagaggaggcggatcccgtgaatatcttggaagagggcccccacctggctctggtcggtgcttcaactgtgggattgatgggcactgggcaagagattgcaaagcaggggattggaaaaacaagtgctatcgctgtggagaaagaggtcacatagaaagaaactgccacaacagtcccaagagtctgagacgtggccgaagttattcacgatcgctatctcctcgccctcgtcgtggtagaagccggagccgaagtttcagccgtagtcgtagctacagtcgatctagatctcctgctccaaggagaagggagcgaagcctagaccgagacgacaggcgatctagaagccctagatacagccccaaatcaaagaacagtcgcagtcctccaccaaagtcaagaaaccgcagcatttctcccgaaggtagcggaagcccaccaccaagagagcagaaaaaagctgaacaaaacggctcagagtacagcggaagcccaaagagaaacgacagccggagccctatcagccaagaaagagagggttctccagaggcaaatggtcggagccctagccctagggattatggggatgccgatgacaacaacaacaataataatcacgggtctaaaggcagcgaatccccgcaggaataa

SEQ ID NO: 150 - protein, 304 aa, Asparagus officinalis
MPRYDDRYGGTRLYVGHLSSRTRTRDLEDLFSRYGRVRDVALKHDYAFVEYSDPRDADDARYSLNGRDFDGSRIIVEFAKGGPRGSGERGGGSREYLGRGPPPGSGRCFNCGIDGHWARDCKAGDWKNKCYRCGERGHIERNCHNSPKSLRRGRSYSRSLSPRPRRGRSRSRSFSRSRSYSRSRSPAPRRRERSLDRDDRRSRSPRYSPKSKNSRSPPPKSRNRSISPEGSGSPPPREQKKAEQNGSEYSGSPKRNDSRSPISQEREGSPEANGRSPSPRDYGDADDNNNNNNHGSKGSESPQE

SEQ ID NO: 151 - DNA, 915 bp, Gossypium hirsutum
atgcctaggtatgatgaccgacgcggtggcactcgtttgtatgttggtcatttgtcttcaaggacaagatcacgtgatctagaggacatgtttagcagatatgggagagtacgtgatgtggatatgaagcgtgactatgcatttgttgaattcagtgatcctagagatgccgatgatgcaagatatgcattgaatggtcgagacatggatggaagccggatgattgttgaatttgccaaaggagtgccccgtggttcaggtggatctcgagattaccctggaagaggtcccactcctgggtcaggacgctgcttcaactgtggaattgatggtcattgggctcgtgattgcaaagccggggattggaagaataagtgttaccgctgtggagaacgaggccatatagaaagaaattgtcaaaacagtccaaagaaactaagaccacgcagttactctcgctcacctagcccctaccgtggtagaagcagaagccgcagttacagcaggggacgcagcgccagtagatcaagatcccctgtgaagagagaccgaagttacgagcgcgaggatagaatatcaaggagccctaagccccccaagggttctccatccccatctcaagggaggaagcatagtccaccccccgatgaaaaaaggccccaagaggggggtggtccttccccaaaggaccgcaggcatgcgaatggttcggattatagtgcaagtcctaggggaaggagcagaagccccgatgctgatgctggggctgaggatggggcttataggagctttaggaaggaaaatggccccagccgcacccttagtcccccccctagggatgacaggagccctgtttacgatgatgatgatgatgatgataatcatgcgtttccccgacgcggtgaatcaaattaa

SEQ ID NO: 152 - protein, 304 aa, Gossypium hirsutum
MPRYDDRRGGTRLYVGHLSSRTRSRDLEDMFSRYGRVRDVDMKRDYAFVEFSDPRDADDARYALNGRDMDGSRMIVEFAKGVPRGSGGSRDYPGRGPTPGSGRCFNCGIDGHWARDCKAGDWKNKCYRCGERGHIERNCQNSPKKLRPRSYSRSPSPYRGRSRSRSYSRGRSASRSRSPVKRDRSYEREDRISRSPKPPKGSPSPSQGRKHSPPPDEKRPQEGGGPSPKDRRHANGSDYSASPRGRSRSPDADAGAEDGAYRSFRKENGPSRTLSPPPRDDRSPVYDDDDDDDNHAFPRRGESN

SEQ ID NO: 153 - DNA, 915 bp, Solanum tuberosum
atgccgcggtatgatgacaggtatggtggcacacgcctatatgttggacatttgtcatcccgaacgcgatctcgagacttggaggacgtctttagcagatatgggagagtacgtgatgtggatatgaagcgtgactatgcttttgtggagtttagtgatcctcgagatgccgatgatgcaagatacggcctaaatgggcgagatgttgatggaagccgcgttatcgtggagttcgccaaaggggtgcctcgtggtccaggtggatctcgagagtttggtggcagaggtcctcctccaggtacaggtcgttgctttaattgtggaattgatggacattgggctcgagattgtaaagctggggactggaagaacaagtgttaccgctgtggagaccgaggtcatatagaaagaaactgtcagaacagccccaagaaattgaaacgtgaccgaagttattcccgctcaccatctcctcggcgtggaagaagccgcagccgcagttacagcagaggtcgtagctacagccgatccaggtctcctgtgaagagggaccgtagcattgagcgtgaagagaagagatcaaggagtcctcgccaacataggccatcaccacctccatcaaagggaaggaaacacagcccttcacctgatgaaagaagtccacaagagagaggtacgccatcaccaagggatgatagggcaaccaatggttctgaccgcagcaggagccctaaagatgatgctagaatggatgaacgcggagatattagccctgttgaagaaaatggccgtagtcgcagcaatagccccatccatagggaggacagaagcccagtggaggacggaagcccaacaggtgactatgaaaatcatggttctccaaggggttctccaaggggcagtgagtcaccctaa

SEQ ID NO: 154 - protein, 304 aa, Solanum tuberosum
MPRYDDRYGGTRLYVGHLSSRTRSRDLEDVFSRYGRVRDVDMKRDYAFVEFSDPRDADDARYGLNGRDVDGSRVIVEFAKGVPRGPGGSREFGGRGPPPGTGRCFNCGIDGHWARDCKAGDWKNKCYRCGDRGHIERNCQNSPKKLKRDRSYSRSPSPRRGRSRSRSYSRGRSYSRSRSPVKRDRSIEREEKRSRSPRQHRPSPPPSKGRKHSPSPDERSPQERGTPSPRDDRATNGSDRSRSPKDDARMDERGDISPVEENGRSRSNSPIHREDRSPVEDGSPTGDYENHGSPRGSPRGSESP

SEQ ID NO: 155 - DNA, 915 bp, Theobroma cacao
atgcctaggtatgatgaccgccgcagtggtactcgcctttatgtcggacacttgtcttcaaggacaagatcacgtgatctagaggacatgtttagcagatatggaagaatacgtgatgtggatatgaagcgcgactatgcatttgttgaatttagcgaccctagagatgctgatgatgcaagatatgcattgaatggtcgagatctagatggaagccgtatcattgtggaattcgccaagggagtgccccgtggcccaggtggatctcgtgattaccctggaagaggaggacctactcctgggtcaggacgctgcttcaactgtggaattgatggtcactgggctcgtgattgcaaagctggagattggaagaataagtgttatcgctgtggagaacgaggccacatagaaagaaattgtcaaaacagtcctaagaaactgagccgcagaccacgcagttactcacgctcacctagtccccgccgtggtagaagcagaagccgtagttacagcagggggcgtagcgacagtcgatcaagatcacctgtgaagagagaaagaagtttcgagcgtgacgatagaagatcaaggagccctaagcgccacaggggttctccgtccccctccaaaggaaggaagcatagtccagcacctgatgaaagaagcccacgagagagaggtagcccttctccaagagaccgcaggcacaccaatggttcagattacagtgcaagtcctaggggaaggagcagaagccctgaccgtgaagctgatgtcgaaggaaggtcttataggagctctgcgaaggaaaacggccacagccgcagccctagcccactccctagggatgacaggagcccaatctacgatgatgatgagaatcatgcttctcctaggcgcagtgaatcaaattaa

SEQ ID NO: 156 - protein, 304 aa, Theobroma cacao
MPRYDDRRSGTRLYVGHLSSRTRSRDLEDMFSRYGRIRDVDMKRDYAFVEFSDPRDADDARYALNGRDLDGSRIIVEFAKGVPRGPGGSRDYPGRGGPTPGSGRCFNCGIDGHWARDCKAGDWKNKCYRCGERGHIERNCQNSPKKLSRRPRSYSRSPSPRRGRSRSRSYSRGRSDSRSRSPVKRERSFERDDRRSRSPKRHRGSPSPSKGRKHSPAPDERSPRERGSPSPRDRRHTNGSDYSASPRGRSRSPDREADVEGRSYRSSAKENGHSRSPSPLPRDDRSPIYDDDENHASPRRSESN

SEQ ID NO: 157 - DNA, 918 bp, Gossypium hirsutum
atgcctaggtatgatgatcaccgtggtggcactcgcctttatgtcggtcacttgtcttcaaggacaagatcacgtgatcttgaggacatgtttagcagatatggaagagtacgtgatgtggatatgaagcgcgactatgcattcgttgaattcagtgaccctagagatgctgatgatgcaagatattcgttgaatggtcgagacctagacggatgccgtatcattgtggaatttgccaagggagtgccccgaggccctggtggatctcgtgattatgctggaagaggtcctactcctggatctgggcgctgcttcaattgtggaatcgatggtcactgggctcgtgattgcaaagccggcgattggaagaataagtgttaccgctgtggggaacgaggccacatagaaagagattgtcaaaacagtccaaagaaactgagccgtagaccacggagttactcgcgttcacccagtgcccgacgtggtcgaagcagaagccgcagttacagccgagggcgtagtgacagtagatcgaaatcacctgtgaagcgagaaagaagtttcgagcgtgacgatagaagatcaaggagtcctaagcgccacaggcgttctctgtccccagttcgggggaggaagcatagtccagcacgtgatgaaagaagcccacaagagagacgtagcccatccccaagggatcgcagacatgccaatggttcggattacagtgggagtcccagggggaggagcagaactccagatcgtgaagctgatgctgaagacagggattataagagctccgcaaaggaaaatgggaacagccgcagtcctagcccgctccccaaagatgatcggagccctatttatgatgaagaagatgatgagaatcatgcatctccgagacgcagcgaatcaaattaa

SEQ ID NO: 158 - protein, 305 aa, Gossypium hirsutum
MPRYDDHRGGTRLYVGHLSSRTRSRDLEDMFSRYGRVRDVDMKRDYAFVEFSDPRDADDARYSLNGRDLDGCRIIVEFAKGVPRGPGGSRDYAGRGPTPGSGRCFNCGIDGHWARDCKAGDWKNKCYRCGERGHIERDCQNSPKKLSRRPRSYSRSPSARRGRSRSRSYSRGRSDSRSKSPVKRERSFERDDRRSRSPKRHRRSLSPVRGRKHSPARDERSPQERRSPSPRDRRHANGSDYSGSPRGRSRTPDREADAEDRDYKSSAKENGNSRSPSPLPKDDRSPIYDEEDDENHASPRRSESN

SEQ ID NO: 159 - DNA, 921 bp, Fragaria vesca
atgcctcgtcatgatgaccgcagtggtggttcacggctctatgttggccgcttgtcgtcccggacaagatcacgggaactcgaagatgtattcagcagatatggaagagtacgtgatgtggatatgaagcgtgattttgcctttgttgaattcaatgatccccgtgatgctgatgacgcaagatacagcctgaacggtcgggatgttgatgggagccgtttaattgtggaatttgccaggggggcaccacgtggtcctggtggatcccgtgagtatcttggtagagggcctcctcctggttcaggtcgctgtttcaattgcggacttgatgggcactgggctcgagattgcaaagctggggactggaagaataagtgttatcgctgtggagatcgaggccacattgaaagaaattgtcagaacagcccaaaaaaaacttcctccaaacgtgggcggagtcactcacgctcaccaagtccaaggcgggacagaagtcgaagccgtagttacagcaggggtcatagttacagtcgatcaagatcacctgtgaggagagaaaggagtctagagagaaggtcgaggagtcctgcagacagccggagcccaaagcgtcgcagggcttctccaccaccttccaaggggaggaagcatgaccaatcacctgatggaagaagcccacaagagaggcgtagcgtctccccgcaggatggccgatctgattacagtaggagtcccaggggaaagagtagaagccctatgggtgatgccgaagagaaaagcaatggtgataagaggcaaagaacccctgtggaagaaaatggccatagccgcagcccaagccccgtgcgtaggggtggcaggagccctgttgaagaggatgatgataaccatggttctccaagaggcagtgaatcagcttaa

SEQ ID NO: 160 - protein, 306 aa, Fragaria vesca
MPRHDDRSGGSRLYVGRLSSRTRSRELEDVFSRYGRVRDVDMKRDFAFVEFNDPRDADDARYSLNGRDVDGSRLIVEFARGAPRGPGGSREYLGRGPPPGSGRCFNCGLDGHWARDCKAGDWKNKCYRCGDRGHIERNCQNSPKKTSSKRGRSHSRSPSPRRDRSRSRSYSRGHSYSRSRSPVRRERSLERRSRSPADSRSPKRRRASPPPSKGRKHDQSPDGRSPQERRSVSPQDGRSDYSRSPRGKSRSPMGDAEEKSNGDKRQRTPVEENGHSRSPSPVRRGGRSPVEEDDDNHGSPRGSESA

SEQ ID NO: 161 - DNA, 927 bp, Lotus japonicus
atgcctcgttatgatgataagcatgacaatacccgcctctatgtgggtcacttgtcttcaaggaccagggaacgtgatctcgagagagctttcagcaagtatggaagagttcgaggtgtggatatgaagcataatttcgcctttgttgaatttagcgatcctcgagatgctgatgatgcaagatataacctggatggtcgtgatgttgaaggaagtcgtattgttgtggaatttgccaaagggggtcctcgcggtaaccgcgaatacttgggtcgaggtccacctcctggatctggacgctgcttcaattgtggccttgatggtcattgggcccgagattgcaaagctggggattggaagaacaagtgctaccgatgtggggataggggtcatgtagaaaggaactgcaagaacagtcccaaaaaaacgagtggcagacgtggaaggagttattctcgttcaccggtcaggtctcgttcccctcgtcgtgacagaagtcgtgatcgaagttatagccgagaccgcagctacagccgatcaagatcccctatcggtagagaaaaaagcccacttcgtgatggatcactcagtcctcgcaacagaagccctgtgcctaaaagtagccctcagccctccaagaccaggaagcatagtttatcacctgaccgagctagcccacagaagagaggtgactcctctcctgctgaggatgggttggtcacccagcaagatgggtctgactacagcaatggccatagagataggagcagaagccctgctagccctgtaagggaccgtgaaggtagccttaaagctaatggtcgcagtcagagccctggccgaagtccaagggatgatgacaggagccccattgatgatgatgatggcaaccaccgccgcttgccaagaggtagtgagtccccttga

SEQ ID NO: 162 - protein, 308 aa, Lotus japonicus
MPRYDDKHDNTRLYVGHLSSRTRERDLERAFSKYGRVRGVDMKHNFAFVEFSDPRDADDARYNLDGRDVEGSRIVVEFAKGGPRGNREYLGRGPPPGSGRCFNCGLDGHWARDCKAGDWKNKCYRCGDRGHVERNCKNSPKKTSGRRGRSYSRSPVRSRSPRRDRSRDRSYSRDRSYSRSRSPIGREKSPLRDGSLSPRNRSPVPKSSPQPSKTRKHSLSPDRASPQKRGDSSPAEDGLVTQQDGSDYSNGHRDRSRSPASPVRDREGSLKANGRSQSPGRSPRDDDRSPIDDDDGNHRRLPRGSESP

SEQ ID NO: 163 - DNA, 927 bp, Triphysaria sp.
atgcctcgttatgaagatagatatggcggtactacccgcctctatgttggccacttgtcttcaaggacccgttctcgagatttggagcacattttcagtagatatggaagaatacgcgacgtggatatgaagcgagactatgccttcatcgagttcagcgatcagcgtgatgctgatgatgcaagatatagcttggatggacgggatgttgatgggcgccgtatcactgttgaatttgccaagggagtgccacgtggagctgggggtgttcgtgagtatgccggccgaggtcctcctccaggatctggacggtgtttcaattgtggcctagatggccattgggcccgagattgcaaagctggagactggaaaaataaatgctatcgttgtcaggaaagaggtcacatcgaaaggaactgccagaacagccctaagaaagcaagtggacgaaggagttattcacggtcacctgtgaggtcacgctctcctcgccgtagtcatcgcagcaggagccggagcttaagtagaagtcgcagttacagtcggtcaaggtcccctgcagctagaaggggtcgtgaaactgatcataaggaaaggagatcgagaagccctatcaatgaaagcccggagccaaagaggtctgtttctccctccaagacgaggaaattgagcccgacgcctgatagggagaggtcgagagagattagcctttcgccagctagggtgggaatggaaacagagcaagttgggtacaacagtgacagccctaaggagactagccgaagcccaccagctaggaggtatgatgagagccctgatgctgctgctgccaatggtcgagaacgaagccccagccctagggatgataggagcccggttgatgatgacgatacgacggcccgttctccaggcagcgagtctccttga

SEQ ID NO: 164 - protein, 308 aa, Triphysaria sp.
MPRYEDRYGGTTRLYVGHLSSRTRSRDLEHIFSRYGRIRDVDMKRDYAFIEFSDQRDADDARYSLDGRDVDGRRITVEFAKGVPRGAGGVREYAGRGPPPGSGRCFNCGLDGHWARDCKAGDWKNKCYRCQERGHIERNCQNSPKKASGRRSYSRSPVRSRSPRRSHRSRSRSLSRSRSYSRSRSPAARRGRETDHKERRSRSPINESPEPKRSVSPSKTRKLSPTPDRERSREISLSPARVGMETEQVGYNSDSPKETSRSPPARRYDESPDAAAANGRERSPSPRDDRSPVDDDDTTARSPGSESP

SEQ ID NO: 165 - DNA, 930 bp, Vitis vinifera
atgagatcgatgctgtcctttttattattaacaataaaaaaaccacatttgggtgcagataaaatgcctcggtatgatgaccgccatgggagtacccgtctttatgttggtcgtttgtcttctcggacaaggtcgcgtgatctggaggacctatttagtagatatggaagagtacgcgatgtggacatgaagcacgactttgcctttgttgaattcagtgatccacgagatgccgatgatgcaaggtatagcttgaatggtcgagatttcgatggaagtcgtataatagtagaatttgctaaggggggtccacgcggtcctggtgggtctcgtgagtatcttggcagaggtcctccacctggatcaggtcgctgctttaactgtggaattgatggccattgggctcgagattgtaaagctggtgattggaagaacaagtgttaccgctgtggggaacggggccatatagaaagaaattgtcagaatagtccgaagaagctaaagcgtggacgtagttattctcggtctccatctcctcgtcgtggtcggagccggagccgaagcagaagtcgtagttacagcaggagccgcagttacagatcatctcctaagagggagcgaagtgctgagcgtctggagagaagatctaggagccctcatgacagcaggagccctaagcggcgcaaggcatcaccaccaccatcaaagggaaggaaacgcagtccaacacctgatgagaggagcccaaaagagagaagcccctccccaagggatcgtaagcagaccaccaatgtgacagccccaggagagacagcccaagagataggaattacaggaggagccctgatgaagaaaatggccacagtcgcagccctagtcccattcctagggacgatgcaagtcctgttgatgatgatgagtaacgagtaa

SEQ ID NO: 166 - protein, 309 aa, Vitis vinifera
MRSMLSFLLLTIKKPHLGADKMPRYDDRHGSTRLYVGRLSSRTRSRDLEDLFSRYGRVRDVDMKHDFAFVEFSDPRDADDARYSLNGRDFDGSRIIVEFAKGGPRGPGGSREYLGRGPPPGSGRCFNCGIDGHWARDCKAGDWKNKCYRCGERGHIERNCQNSPKKLKRGRSYSRSPSPRRGRSRSRSRSRSYSRSRSYRSSPKRERSAERLERRSRSPHDSRSPKRRKASPPPSKGRKRSPTPDERSPKERSPSPRDRKQTTNVTAPGETAQEIGITGGALMKKMATVAALVPFLGTMQVLLMMMSNE

SEQ ID NO: 167 - DNA, 939 bp, Pinus taeda
atgccccgctatgatgatcgttctggaaacacacggctctatgttggccgactgtcttctcgtacccgtacacgtgatcttgaggatcttttcaacagatatggaagagtccgtgatgtggatttgaagcacgacttcgcctttattgaatttagcgatcctcgtgatgcggatgaagcaagatactatcttaatggaagagatctcgatgggagtcgcattgttgtggaatttgcaagagggggaccacgaggagctggtcgaactagagaatatctaggaaggggccctccccctgggtctgggcggtgcttcaattgtgggaatgatggccattgggctcgagactgtaaagcaggggattggaaaaacaaatgttatcgttgtggtgagcgtggtcatattgaaagaaactgtcaaaacagtccaaaatcaaccaggcgtgagcggtctatttcaagatcacgttctaggtcattgtcgcatcgtcgtggaagaagccgcagtctaagctacaacagccgaagtcgcagctacagtcgatcccccagatcaccaaggacagatgggcgtagtgcagttcaggttgaaaggagatcaagaagtcgaagttacagccacagtcctaggagggcaaggagacaaagcccagaaatagatggtcgcaggagcagcagtcgttcagctgacaatgcaagtggccagaggggcagtagatatagtccgaaacgaaacagtcgcaggagtgacagtccagcactagacactgcatcaagggacattgctagtcctcagagggatactcctgtaagatcccaaagtccagctgcaaacggcaagcccagtcatgatgtaagcccagatgccatgaaaaatcaaagcccaagcccaatcagagattcatctgctttcagagagagccctggaactagttcttga

SEQ ID NO: 168 - protein, 312 aa, Pinus taeda
MPRYDDRSGNTRLYVGRLSSRTRTRDLEDLFNRYGRVRDVDLKHDFAFIEFSDPRDADEARYYLNGRDLDGSRIVVEFARGGPRGAGRTREYLGRGPPPGSGRCFNCGNDGHWARDCKAGDWKNKCYRCGERGHIERNCQNSPKSTRRERSISRSRSRSLSHRRGRSRSLSYNSRSRSYSRSPRSPRTDGRSAVQVERRSRSRSYSHSPRRARRQSPEIDGRRSSSRSADNASGQRGSRYSPKRNSRRSDSPALDTASRDIASPQRDTPVRSQSPAANGKPSHDVSPDAMKNQSPSPIRDSSAFRESPGTSS

SEQ ID NO: 169 - DNA, 939 bp, Poncirus trifoliata
atgcctcgttatgatgaccggtacggtggtacgcgtctctatgttggccgcttggcttcacggacaagatcacgcgatcttgaggagatctttagcagatatgggagaattcgcgatgtggatatgaagcgtgacttcgcctttgttgaatttagcgaccctcgcgatgctgacgatgcaagatatagcttaaatggtcgggatgttgatggaagccgtatcattgtggaatttgcaagaggggggccacgtggtcctggtggatctcgtgagtatcttggtcgaggccctcctcctggatctgggcgctgcttcaattgtgggattgatggccattgggctcgagactgcaaggctggagactggaagaataagtgttatcgctgtggtgaacgaggccacatagaacgaaattgtcaaaacagtccaaagaagttaaggaggcctcggagttattcacgttctccaagtcctcgtcgtggtagaagcaggagccgtagttacagtagaggccgcagcgacagccgatcacgatcgcctgtcaagagagataggagtgtcgaacgttttgagagaagaacaaggagcccccgagacagtaggagccctaagcgtcgcagaaattcaccaccatcatctaaaggtaggaagcgtagtccaaccccagatgaaagaagtccacaagatcaacgtagcccatccccaagggaccggaggcaggctaatggatcagagtacagtggcagtccaaggggaaagagcagaagccctgtagatgatgccgatggccctgaggataggaattacaggagccctcccgaagagaatggccgcagccgaagccgcagccgcagccttagtccagtccctagggatgataggagcccaattgatgatgatgataatcatggggaccctagaggcagcgaatcaaattaa

SEQ ID NO: 170 - protein, 312 aa, Poncirus trifoliata
MPRYDDRYGGTRLYVGRLASRTRSRDLEEIFSRYGRIRDVDMKRDFAFVEFSDPRDADDARYSLNGRDVDGSRIIVEFARGGPRGPGGSREYLGRGPPPGSGRCFNCGIDGHWARDCKAGDWKNKCYRCGERGHIERNCQNSPKKLRRPRSYSRSPSPRRGRSRSRSYSRGRSDSRSRSPVKRDRSVERFERRTRSPRDSRSPKRRRNSPPSSKGRKRSPTPDERSPQDQRSPSPRDRRQANGSEYSGSPRGKSRSPVDDADGPEDRNYRSPPEENGRSRSRSRSLSPVPRDDRSPIDDDDNHGDPRGSESN

SEQ ID NO: 171 - DNA, 939 bp, Sorghum bicolor
atgcctcgctatgatgatcgctatgggaatacacgcttgtatgttggaagattggctccccgcacccgttcccgcgacctagaatatcttttcagcaaatatggaagaatacgtgaagtggagttgaagcgcgactatgcattcattgaattcagcgacccccatgatgctgatgatgcgcagtacaacctagatggcagggaagttgatggaagccgcattattgttgaatttgccaaaggggttcctcgtggttctggtggttcacgtgaatacatgggaagagggcctccaccaggaacaggccgctgttttaactgtggaattgatggtcactgggcaagagactgcaaggctggtgactggaagaacaaatgctaccgctgtggcgaaaggggccatatagaaagaaattgccagaacagcccaaggaatctcaggcgtgagagaagctattcacggtctccatccccacgccgtggacggggccgcagccggagctacagcagaagccgtagctatagccgatccaggtccccatctggatctcccaggggtggacgccgcgaacgtgacgagaggagatcaaggagcctgagctacagcaggagtgcaagccccaggcgttctgtgtcaccagcgaaggaaaaggagcgcagccgcactcctgatggcagtaggagcccaaggagccccagcccaagggatgatgtgagcccaccaccaaaggataatggtgcacacaacggctcagaccgtgaagacagccctggggccagggagaacagcaagaggagtcggagcccatctgacggctaccgtagccctgcggccaatgggcgcagcccgagccctagagatgaccgtagcccaagccccaagggcaacaatggtgatgacgagcgccgtggctcaccaagaggaagtcagtccccttga

SEQ ID NO: 172 - protein, 312 aa, Sorghum bicolor
MPRYDDRYGNTRLYVGRLAPRTRSRDLEYLFSKYGRIREVELKRDYAFIEFSDPHDADDAQYNLDGREVDGSRIIVEFAKGVPRGSGGSREYMGRGPPPGTGRCFNCGIDGHWARDCKAGDWKNKCYRCGERGHIERNCQNSPRNLRRERSYSRSPSPRRGRGRSRSYSRSRSYSRSRSPSGSPRGGRRERDERRSRSLSYSRSASPRRSVSPAKEKERSRTPDGSRSPRSPSPRDDVSPPPKDNGAHNGSDREDSPGARENSKRSRSPSDGYRSPAANGRSPSPRDDRSPSPKGNNGDDERRGSPRGSQSP

SEQ ID NO: 173 - DNA, 939 bp, Saccharum officinarum
atgcctcgctatgatgatcgctatgggaatacacgcttgtatgttggaagattggctccccgcacccgttcccgcgacctagaatatcttttcagcaaatatggaagaatacgtgaagtggagttgaagcgcgactatgcattcattgaattcagcgacccccaagatgctgatgatgcgcagtacaacctagatggcagggaagttgatggaagccggattattgttgaatttgctaaaggggttcctcgtggttctagtggttcacgtgaatatatgggaagaggacctccaccaggaacaggtcgttgttttaactgtggaattgatggtcactgggcaagagactgcaaggctggtgactggaagaacaaatgttaccgctgtggcgaaaggggccatatagaaagaaattgccagaacagtccaaggaatctcaggcgtgagagaagctattcacgttctccatccccacgccgtggacggggccgcagccggagctacagcagaagccggagctatagccgatccaggtccccatctggatctccgaggggtggacgccgtgaccgtgatgagaggagatcaaggagtgttagctacagcaggagcgcaagccctaggcgttctgtctcacctgcaaaggaaaaggagcgcagccgcacacctgatggcagcaggagcccaaggagccccagcccaagggatgatgtgagcccaccaccaaaggataatggtgcacgcaacggctcagaccgtgaagacagccctggggccagggagaacagcaagaggagtcggagcccatctgatggctaccgtagccctgcggccaatgggcgcagcccgagccctagggatgaccgtagcccaagccccaagggtgacaacggcgatgacgagcgccgtggttcaccaagaggaagtcagtccccctga

SEQ ID NO: 174 - protein, 312 aa, Saccharum officinarum
MPRYDDRYGNTRLYVGRLAPRTRSRDLEYLFSKYGRIREVELKRDYAFIEFSDPQDADDAQYNLDGREVDGSRIIVEFAKGVPRGSSGSREYMGRGPPPGTGRCFNCGIDGHWARDCKAGDWKNKCYRCGERGHIERNCQNSPRNLRRERSYSRSPSPRRGRGRSRSYSRSRSYSRSRSPSGSPRGGRRDRDERRSRSVSYSRSASPRRSVSPAKEKERSRTPDGSRSPRSPSPRDDVSPPPKDNGARNGSDREDSPGARENSKRSRSPSDGYRSPAANGRSPSPRDDRSPSPKGDNGDDERRGSPRGSQSP

SEQ ID NO: 175 - DNA, 942 bp, Brassica napus
atgcctagatatgatgatcgttacgggaacactcgtctgtacgttggacacttatcatccagaactcgtaccagagaccttgaacgccttttcaacagatacggaagagtgcgagatgtggatatgaagcgggattatgcctttgttgaatttagtgatccccgtgatgctgatgacgcgagacattacttggatggaagagactttgacggaagtcgcatcacagtggagttttcaagaggggcacctcgtggctctcgggattatgacagcagaggcccacctcctggagcaggtcgctgctttaactgtggtcttgacggtcattgggcccgagactgcactgcaggagactggaagaacaagtgttaccgctgtggtgaaagaggacatattgagagaaactgcaagaacagtcccaagaagctcaggcggagtggaagctactccaggtcacctgtaagatcccgttctcctcgtcgtagaagaagcccaagccgtagcaggagtcttagccgtagccgaagctacagccgctcaagatcccctgtgaaaagaagagagagaagtgcagaggagagatctcgcagtccaaaaagaatggaggactctctatcgccaagaggcagagaccgtagtccgattatagatgatgaaggtagcccaaggatcatagacggagccctccaccttctccaaagcttgaaaagccagcaggatcagaccatgatggtggtagcagccctcaagacaatggtaatggaagaaacactgttgccagtcctgctgtgggacgcagtgccgacagtccgagagaagaccggagccccgttgatgatgattacgaggccaaccgtgcttcacctagaggaagcgagtctccttgactttgatggctcatggcctcagggttactggtgctctagcatgttgtactattga

SEQ ID NO: 176 - protein, 313 aa, Brassica napus
MPRYDDRYGNTRLYVGHLSSRTRTRDLERLFNRYGRVRDVDMKRDYAFVEFSDPRDADDARHYLDGRDFDGSRITVEFSRGAPRGSRDYDSRGPPPGAGRCFNCGLDGHWARDCTAGDWKNKCYRCGERGHIERNCKNSPKKLRRSGSYSRSPVRSRSPRRRRSPSRSRSLSRSRSYSRSRSPVKRRERSAEERSRSPKRMEDSLSPRGRDRSPIIDDEGSPRIIDGALHLLQSLKSQQDQTMMVVAALKTMVMEETLLPVLLWDAVPTVREKTGAPLMMITRPTVLHLEEASLLDFDGSWPQGYWCSSMLYY

SEQ ID NO: 177 - DNA, 945 bp, Aquilegia sp.
atgcctcgttatgatgatcgtgatcgctatggcaacagtacgcgcctttatgttggtcatttgtcttctcgaacacgctctcgtgatttggaagacctattcagcagatatggaagagtacgcgatgtggatttgaagcacgacttcgcctttattgaatttagtgatcctcgagatgctgatgatgctagatatagcttaaatggtcgaccaattgatggaagccgcattgtggtggaatttgctaaagggggaccacgtggtgcagccagttctagggagtatctgggtagaggccctcctcctggatctggtcggtgcttcaattgtgggattgatggtcactgggcacgagattgcaaagctggtgattggaaaaataagtgctatcgctgtggtgaacgaggtcacatagagcgcaactgtcagaatagcccgaagagtctaaagcgtgggcggagttattcacaatctagatcccctcctcgacgtggtagaagccgaagccgaagtttcagccgaagtcgcagttatagccgatcgcgaacacctccaaagagagagcgaagccttgagcgtgaggaaaggagatcaaggagccctcgctacagtaggagcccaaaatcaaagaagagttccccacctccatcaaaaggtaggaagcgcagtccaacacctggcgatgacaggccccaagcaagaggaagtcctccagctaacaataggcaagatgttcagcttgatggttctgattacagtgggagccctaggggtaagagcagaagccccagtcctgttggtaaaaggtttgaaagcccttctgaagcaaatggccatagccgcagtctcagtcccagggatgataggagcccaatggatgacgatggcaatgaaaggcttgcttcgcctagaggcagtgagtcaccttcgagtgcgcaagattaa

SEQ ID NO: 178 - protein, 314 aa, Aquilegia sp.
MPRYDDRDRYGNSTRLYVGHLSSRTRSRDLEDLFSRYGRVRDVDLKHDFAFIEFSDPRDADDARYSLNGRPIDGSRIVVEFAKGGPRGAASSREYLGRGPPPGSGRCFNCGIDGHWARDCKAGDWKNKCYRCGERGHIERNCQNSPKSLKRGRSYSQSRSPPRRGRSRSRSFSRSRSYSRSRTPPKRERSLEREERRSRSPRYSRSPKSKKSSPPPSKGRKRSPTPGDDRPQARGSPPANNRQDVQLDGSDYSGSPRGKSRSPSPVGKRFESPSEANGHSRSLSPRDDRSPMDDDGNERLASPRGSESPSSAQD

SEQ ID NO: 179 - DNA, 945 bp, Pinus pinuster
atgccccgctatgatgatcgttctggaaacacacggctctatgttggccgactgtcctctcgtacccgtacacgtgatcttgaggatcttttcaacagatatggaagagtccgtgatgtggatttgaagcacgacttcgcctttattgaatttagtgatcctcgtgatgcggatgaagcaagatactatctcaatggaagagatctggatgggagtcgcattgttgtggaatttgcaagagggggaccacgaggagctggtcgaactagagaatatctaggaaggggccctccccctgggtctgggcggtgcttcaattgtgggaatgatggccattgggctcgagactgtaaagcaggggattggaaaaacaaatgttatcgttgtggtgagcgtggtcatattgaaagaaactgtcaaaacagtccaaaatcaaccaggcgtgagcggtctatttcaagatcacgttctaggtcattgtcgcatcgtcgtggaagaagccgcagtctaagctacaacagccgaagtcgcagctacagtcgatcccccagatcaccaaggacagatggccgtagtgcagttcaggttgaaaggagatcaagaagtcgaagttacagtcacagtcctaggagggcaaggagacaaagctcagaaataggtggtcgcaggagcagcagtcgttcagctgacaatgcaagtggccagaggggcagtagatatagtccgaaacgaaacaatcgcaggagtgacagtccagcactagatactgaccgtgcgtcaagggacattgctagtcctcagagggatactcctgtaagatcccaaagtccagctgcaaacggcaagcccagtcatgatgtaagcccagatgccatgaaaaatcaaagctcaagcccaatcagagattcatctgctttcagagagagccctggaactagttcttga

SEQ ID NO: 180 - protein, 314 aa, Pinus pinuster
MPRYDDRSGNTRLYVGRLSSRTRTRDLEDLFNRYGRVRDVDLKHDFAFIEFSDPRDADEARYYLNGRDLDGSRIVVEFARGGPRGAGRTREYLGRGPPPGSGRCFNCGNDGHWARDCKAGDWKNKCYRCGERGHIERNCQNSPKSTRRERSISRSRSRSLSHRRGRSRSLSYNSRSRSYSRSPRSPRTDGRSAVQVERRSRSRSYSHSPRRARRQSSEIGGRRSSSRSADNASGQRGSRYSPKRNNRRSDSPALDTDRASRDIASPQRDTPVRSQSPAANGKPSHDVSPDAMKNQSSSPIRDSSAFRESPGTSS

SEQ ID NO: 181 - DNA, 945 bp, Panicum virgatum
atgcctcgctatgatgatcgttatgggaacacacgcttgtatgttggcagactgtcctcccgcactcgttcccgtgacctggaatatcttttcagcaaacatggaagaatacgagaagtggagttgaagcgcgactatgcatttattgaattcagcaatcctcgtgatgctgatgatgcacaatacaacctagatggcagggaagttgatgggagccgcatcattgttgagtttgctaaaggggttcctcgtggttctggtggctcacgtgagtacatgggaagagggcctccgccagggacaggtcgttgttttaactgtggaattgatggtcactgggcaagggactgcaaggctggtgactggaagaacaaatgctaccgttgtggagaaaggggccacatagaaagaaattgccagaacagtccccagaatctcaggcgtgagagaagttattcacggtcaccatctccacaccgtggacgggggcgcagccggagctacagcagaagccgtagctatagccgttctagatccccatctggatctcccaggggtggacgccgagaccgtgatgagaggagatcaaggagtcttagctacagcaggagccccaggcgttctgcttcaccaagtgctaaggaaaaggagcgcagccccacacccaacggcagtaggagcccaaggagtcccagcccaagggatcaggtgagcccgccaccaaaggacaatggtgaacgcaatggctcagaccgtggtgacagccctgcgaagagggagaacagcaggagcaggagcaggagccgtagcccatctgatggctaccgtagccctgcagccaatgggcgcagcccgagccctagagatgaccggagccctagtcccaaaggcaatgctggtgatgatgatgaccgtggttcaccaagaggaagccagtccccctga

SEQ ID NO: 182 - protein, 314 aa, Panicum virgatum
MPRYDDRYGNTRLYVGRLSSRTRSRDLEYLFSKHGRIREVELKRDYAFIEFSNPRDADDAQYNLDGREVDGSRIIVEFAKGVPRGSGGSREYMGRGPPPGTGRCFNCGIDGHWARDCKAGDWKNKCYRCGERGHIERNCQNSPQNLRRERSYSRSPSPHRGRGRSRSYSRSRSYSRSRSPSGSPRGGRRDRDERRSRSLSYSRSPRRSASPSAKEKERSPTPNGSRSPRSPSPRDQVSPPPKDNGERNGSDRGDSPAKRENSRSRSRSRSPSDGYRSPAANGRSPSPRDDRSPSPKGNAGDDDDRGSPRGSQSP

SEQ ID NO: 183 - DNA, 945 bp, Zea mays
atgcctcgttatgatgatcgccatgggaatacacgcttgtatgttggaagattggcccctcgcacccgttcccgcgacctagaatatcttttcagcaaatatggaagaatacgtgaagtggagttgaagcgtgactatgcattcattgaattcagtgacccccgtgatgctgatgatgcgcagtacaacctagatggcagggaagtcgatggaagccgtattattgttgaatttgctaaaggagttcctcgtggttctggtggttcacgtgagtacatgggaagaggacctccaccaggaacaggtcgttgttttaactgtggaatggatggtcactgggcaagggactgcaaggctggtgactggaagaacaaatgctaccgctgtggtgaatcgggccatatagagagaaattgccagaacagtccaaggaatctcaggcgtgataaaagctattcacggtctccatccccacgtggtggacgtggccgcagccggagctacagcagaagccggagctatagccgatccagatccccatctggatctcccaggggtggacgccgtgaacgtgacgagaggagatctaggagtcttagctacagcaggagcgcaagccccaggcgttctgtctcacctgcaaaggaaaaggagcgcagtcgcacacccaatggcagtaggagcccaaggagccccagcccaagggctgaggtgagcccaccactgaaggataatggtgcacgcaatggctcagaccatgaaggcaaccctggtggtggagagaacagcaagaggagtcggagcccatctgatggctaccgtagccctgtggccaatgggcgcagcccgagcccgagggacgatcggagcccaagccccaagggcaacaacgaagatgacgagcgccgtggttcacctagaggaagtcagtcccccctgaactga

SEQ ID NO: 184 - protein, 314 aa, Zea mays
MPRYDDRHGNTRLYVGRLAPRTRSRDLEYLFSKYGRIREVELKRDYAFIEFSDPRDADDAQYNLDGREVDGSRIIVEFAKGVPRGSGGSREYMGRGPPPGTGRCFNCGMDGHWARDCKAGDWKNKCYRCGESGHIERNCQNSPRNLRRDKSYSRSPSPRGGRGRSRSYSRSRSYSRSRSPSGSPRGGRRERDERRSRSLSYSRSASPRRSVSPAKEKERSRTPNGSRSPRSPSPRAEVSPPLKDNGARNGSDHEGNPGGGENSKRSRSPSDGYRSPVANGRSPSPRDDRSPSPKGNNEDDERRGSPRGSQSPLN

SEQ ID NO: 185 - DNA, 951 bp, Aquilegia sp.
atgcctcgttatgatgatcgtgatcgctatggcaacagtacgcgcctttatgttggtcatttgtcttctcgaacacgctctcgtgatttggaagacctattcagcagatatggaagagtacgcgatgtggatttgaagcacgacttcgcctttattgaatttagtgatcctcgagatgctgatgatgctagatatagcttaaatggtcgaccaattgatggaagccgcattgtggtggaatttgctaaagggggaccacgtggtgcagccagttctagggagtatctgggtagaggccctcctcctggatctggtcggtgcttcaattgtgggattgatggtcactgggcacgagattgcaaagctggtgattggaaaaataagtgctatcgctgtggtgaacgaggtcacatagagcgcaactgtcagaatagcccgaagagtctaaagcgtgggcggagttattcacaatctagatcccctcctcgacgtggtagaagccgaagccgaagtttcagccgaagtcgcagttatagccgatcgcgaacacctccaaagagagagcgaagccttgagcgtgaggaaaggagatcaaggagccctcgctacagtaggagcccaaaatcaaagaagagttccccacctccatcaaaaggtaggaagcgcagtccaacacctggcgatgacaggccccaagcaagaggaagtcctcctcctccagctaacaataggcaagatgttcagcttgatggttctgattacagtgggagccctaggggtaagagcagaagccccagtcctgttggtaaaaggtttgaaagcccttctgaagcaaatggccatagccgcagtctcagtcccagggatgataggagcccaatggatgacgatggcaatgaaaggcttgcttcgcccagaggcagtgagtcaccttcgagtgcgcaagattaa

SEQ ID NO: 186 - protein, 316 aa, Aquilegia sp.
MPRYDDRDRYGNSTRLYVGHLSSRTRSRDLEDLFSRYGRVRDVDLKHDFAFIEFSDPRDADDARYSLNGRPIDGSRIVVEFAKGGPRGAASSREYLGRGPPPGSGRCFNCGIDGHWARDCKAGDWKNKCYRCGERGHIERNCQNSPKSLKRGRSYSQSRSPPRRGRSRSRSFSRSRSYSRSRTPPKRERSLEREERRSRSPRYSRSPKSKKSSPPPSKGRKRSPTPGDDRPQARGSPPPPANNRQDVQLDGSDYSGSPRGKSRSPSPVGKRFESPSEANGHSRSLSPRDDRSPMDDDGNERLASPRGSESPSSAQD

SEQ ID NO: 187 - DNA, 951 bp, Picea sitchensis
atgccccgctatgatgatcgttctggaaacacacggctctatgttggccgactatcttctcgcacacgtacacgtgatcttgaggatcttttcaacagatatggaagagtccgtgatgtggatttgaagcacgacttcgcctttattgaatttagcgatcctcgtgatgcggatgaagcaagatactatcttaatggaagagatctggatgggagccgcattgttgtggagtttgcaagagggggaccacgaggagctgctgggggtcgaactagagaatatctgggaagaggccctccccctgggtctgggcgatgcttcaattgtggcaatgatggccattgggctcgagactgtaaagctggggattggaaaaataaatgttatcgctgtggtgagcggggtcatattgaaagaaactgtcaaaacagtccaaaatcaaccaggcgtgagcggtctgtttcaagatcaccttccaggtcattgtcgcgtcgtcgtggaagaagccgtagtgcaagttacaacagcagaagtcgcagctacagtcgatcccccagatcaccaaggacagatggtcgtagtgcagttcaggatgaaaagagatcaagaagtcgaagttacagccacagtcctaggagggcaaggagacaaagcccagaaatggatggtcgtaggagcagcagtccttcagctgacaacgcaagtggccagagaggcactagatatagtccaaaacgaaacagtcgcaggagtgacagtccagcattagatactgaccgtgcatcaagggacattgctagtcctcagagggacagccctggaaggtcccaaagtccagctgcaaatggcaagcccagtcatgatgtaagcccagatactatgaaaaatcaaagcccaagccctatgagagaatcatctgctttcagagagagccctggaactagttcttga

SEQ ID NO: 188 - protein, 316 aa, Picea sitchensis
MPRYDDRSGNTRLYVGRLSSRTRTRDLEDLFNRYGRVRDVDLKHDFAFIEFSDPRDADEARYYLNGRDLDGSRIVVEFARGGPRGAAGGRTREYLGRGPPPGSGRCFNCGNDGHWARDCKAGDWKNKCYRCGERGHIERNCQNSPKSTRRERSVSRSPSRSLSRRRGRSRSASYNSRSRSYSRSPRSPRTDGRSAVQDEKRSRSRSYSHSPRRARRQSPEMDGRRSSSPSADNASGQRGTRYSPKRNSRRSDSPALDTDRASRDIASPQRDSPGRSQSPAANGKPSHDVSPDTMKNQSPSPMRESSAFRESPGTSS

SEQ ID NO: 189 - DNA, 960 bp, Nicotiana tabacum
atgcctcgttatgatgatcgatcgggaaatagcactcgtctctatgtgggccacttgtcttcacggacccgttcacgtgatctggagcgtgtattcagtaaatatgggagagtacgtgatgtggacatgaagcacgactatgccttcgtagaatttagtgatccacgagatgctgatgatgcaagatactatttagatgggcgggacgttgatggccgccgcataattgtggaatttgctaagggagtgccacgtggacctggtggttcgcgtgagtatcttggcaaaggacctgctcctggctcaggccgttgcttcaactgtggccttgaaggtcactgggctcgagattgcaaagctggggattggaagaataaatgttatcggtgtggagaaagaggccatatagaaaaaaaatgcccaaatagtcctaaaaaactcagtcgacgggatcggagctactcacggtcgcctgtcaggtcaaggtcacactcacgttcacgttctcctcgtcgtcgaagttacagcagaagtcgcagctatagtccatcaagatctcctgctccaaggagaggaaaagttgacatagagaggaggtcaagaagctacagtaggagccctgagccaaagaaggctagtccaagtcctagtctgagtcctccaccgaagacaaggaagcatagcccgacacccgaagatggaagccctacggaagcaatgaggacgaccaccagagaagaaggtagctatagccaaagccccagagagagaagtgcaagtcctttaagtcctagacgaggggatagccctgcacctgaaagggatgaggacagccctgctgaagctaacggtggaagtcgcagcccgagtcccaattaccagaggaaccgtgcagatgatgatgaggatgaaggtgagtataataatcaacgctcaggcagagagagcgagtcgccttga

SEQ ID NO: 190 - protein, 319 aa, Nicotiana tabacum
MPRYDDRSGNSTRLYVGHLSSRTRSRDLERVFSKYGRVRDVDMKHDYAFVEFSDPRDADDARYYLDGRDVDGRRIIVEFAKGVPRGPGGSREYLGKGPAPGSGRCFNCGLEGHWARDCKAGDWKNKCYRCGERGHIEKKCPNSPKKLSRRDRSYSRSPVRSRSHSRSRSPRRRSYSRSRSYSPSRSPAPRRGKVDIERRSRSYSRSPEPKKASPSPSLSPPPKTRKHSPTPEDGSPTEAMRTTTREEGSYSQSPRERSASPLSPRRGDSPAPERDEDSPAEANGGSRSPSPNYQRNRADDDEDEGEYNNQRSGRESESP

SEQ ID NO: 191 - DNA, 972 bp, Hordeum vulgare
atgcctcgctatgatgagcgtgatcgttacggcggcaatacaaggctgtacgtgggtcgtcttccctcgcgcacccgcacaagggaccttgaagacctcttcggcagatatgggagagtgcgacatgtggatatgaagcatgagtttgcatttgttgagtttagtgatcccagggatgctgatgaagcaaggtacaaccttgatggtcgtgactttgatggaagccgcatgattgtcgagtttgctaaaggggttccgcgtggccaaggaggaggaggtgaccgtgaccgtggccgtggtggtgaccgtgaatatatgggccgggggcctcctcctggttctggccgctgctttaactgtggcattgatggccattgggctcgtgactgcaaagctggcgactggaaaaataggtgctatcgttgtggagatagtggccatatagaaagggattgtcagaacagccctaagaacctcaagcgtggaaagagttactccagatctccatctcctcgccgcggaagggtgcgcgataggagctacagcaggagtcgcagtaggagctacagccgctctgtttccccaaggagggatgaaaggcgctcaaggagcccccgtgacagtcgcagcccaaggaggagcccccgtgacagtcgcagccctaggaggagcccccgagacagtcgcagccctatgaagagcccccgtggcagtcgcagccctatgaggagcccccgtgacagccgcagccctaggaggagtgcttcacctgccaaggggagggcccggagccccacccctcctggcagcagaagccctgcaccaagggagaacagcaggagtccgatgaaggctgacagccctaataacatgagcccagctgcaaatggtcgtagcccgagccccagggacggcgaagacaatggcaaccatcgtgcacccagtggaagtgcatcacccggtggtggttaa

SEQ ID NO: 192 - protein, 323 aa, Hordeum vulgare
MPRYDERDRYGGNTRLYVGRLPSRTRTRDLEDLFGRYGRVRHVDMKHEFAFVEFSDPRDADEARYNLDGRDFDGSRMIVEFAKGVPRGQGGGGDRDRGRGGDREYMGRGPPPGSGRCFNCGIDGHWARDCKAGDWKNRCYRCGDSGHIERDCQNSPKNLKRGKSYSRSPSPRRGRVRDRSYSRSRSRSYSRSVSPRRDERRSRSPRDSRSPRRSPRDSRSPRRSPRDSRSPMKSPRGSRSPMRSPRDSRSPRRSASPAKGRARSPTPPGSRSPAPRENSRSPMKADSPNNMSPAANGRSPSPRDGEDNGNHRAPSGSASPGGG

SEQ ID NO: 193 - DNA, 972 bp, Triticum aestivum
atgcctcgctacgatgagcgtgatcgttatggcggcaacacaaggctgtacgtgggtcgtcttccctcgcgcacccgcacaagggaccttgaagacctcttcggcagatatgggagagtgcgacatgtggatatgaagcacgagtttgcatttgttgagtttagtgatcccagggatgctgatgaagcaaggtacaatcttgatggtcgtgactttgatggaagccgcatgattgttgagtttgctaaaggggttccgcgtggccaaggaggaggaggtgaccgtgaccgtggccgtggtggtgaccgtgaatatatgggtcggggacctcctcctggttctggccgttgctttaactgtgggattgatgggcattgggctcgtgactgcaaagctggcgactggaaaaataggtgctatcgttgtggagatagtggccacatagaaagggattgccagaacagccctaagaacctcaagcgtggaaagagttactccagatctccatctcctcgccgcggaagggtgcgtgataggagctacagcaggagccgcagtaggagctacagccgctctgtttccccaaggagggatgaaaggcgatcaaggagccctcgcgacagtcgcagcccaaggaggagcccccgtgacagtctcagccccaggaggagcccccgcaacagtcgcagccctatgaagagcccccgtggcagtcgcagccctatgaggagcccccgtgacagtcgcagccctaggaggagtgcttcacctgccaaggggagggcccggagccccacccctcctggcagcaggagccctgcaccaagggataacagcaggagcccaatgaaggctgacagccctaaaaacatgagcccagctgccaatggtcgtagcctgagccccagggacggcgaagacaatggccaccaccgtgcacccagtggaagtgcatcacccggtggtggttag

SEQ ID NO: 194 - protein, 323 aa, Triticum aestivum
MPRYDERDRYGGNTRLYVGRLPSRTRTRDLEDLFGRYGRVRHVDMKHEFAFVEFSDPRDADEARYNLDGRDFDGSRMIVEFAKGVPRGQGGGGDRDRGRGGDREYMGRGPPPGSGRCFNCGIDGHWARDCKAGDWKNRCYRCGDSGHIERDCQNSPKNLKRGKSYSRSPSPRRGRVRDRSYSRSRSRSYSRSVSPRRDERRSRSPRDSRSPRRSPRDSLSPRRSPRNSRSPMKSPRGSRSPMRSPRDSRSPRRSASPAKGRARSPTPPGSRSPAPRDNSRSPMKADSPKNMSPAANGRSLSPRDGEDNGHHRAPSGSASPGGG

SEQ ID NO: 195 - DNA, 975 bp, Oryza sativa
atgcctcgctatgatgaccgtgatcgctacgatgaccgttacggcggcaacacgaggctgtacgtaggtcgtctttcctcgcgcacccggacccgggaccttgaagaccttttcggcagatatgggagagtgcgatatgtggatatgaagcacgagtttgcatttgttgaatttagtgatgctcgggatgctgatgaggcaaggtacaacctggatggtcgggactttgatggaagccgcatgattgttgagtttgctaaaggggttccacgtggccctggaggatcacgtgaatatatgggcagaggaccaccacctggttctggccgctgctttaactgtgggattgatgggcactgggcccgtgactgcaaagctggagactggaaaaacagatgctatcggtgtggagacaggggccatatagaaagggactgccggaacagccctaagaatctcaagcgtggaagaagctactcaagatccccatcccctcgtcgtgggaggagccgtggtaggagctacagcaggagccgtagcaggagctacagccgctcccagtctccaaggagggatagccgtaatgaaaggagatcaaggagccctcgtgacagtcggagccctaggggaagcccccgtgacagtcgcagccctagggggagcccccgtgacagtcgcagccctaaggggagccctcgcgacacccagagccctaggggaagccctcgtgatagccgcagccctaggagaagtgcttcaccacccaacgggaggaaccgcagccctacccctaatgccagcaggagtcctgcaccaagggacagcaggagcccaatgagagctgacagccgtagccctgctgaccatgagcgccgtgacatgagtacagctgccaatggccggagcccaagccccagggattatgaagacaatggcaatcatcgggcctcgcctagaggaagcgcatccccttga

SEQ ID NO: 196 - protein, 324 aa, Oryza sativa
MPRYDDRDRYDDRYGGNTRLYVGRLSSRTRTRDLEDLFGRYGRVRYVDMKHEFAFVEFSDARDADEARYNLDGRDFDGSRMIVEFAKGVPRGPGGSREYMGRGPPPGSGRCFNCGIDGHWARDCKAGDWKNRCYRCGDRGHIERDCRNSPKNLKRGRSYSRSPSPRRGRSRGRSYSRSRSRSYSRSQSPRRDSRNERRSRSPRDSRSPRGSPRDSRSPRGSPRDSRSPKGSPRDTQSPRGSPRDSRSPRRSASPPNGRNRSPTPNASRSPAPRDSRSPMRADSRSPADHERRDMSTAANGRSPSPRDYEDNGNHRASPRGSASP

SEQ ID NO: 197 - DNA, 978 bp, Zea mays
atgcctcgttatgatgatcgccatgggaatacacgcttgtatgttggaagattggcccctcgcacccgttcccgcgacctagaatatcttttcagcaaatatggaagaatacgtgaagtggagttgaagcgtgactatgcattcattgaattcagtgacccccgtgatgctgatgatgcgcagtacaacctagatggcagggaagtcgatggaagccgtattattgttgaatttgctaaaggagttcctcgtggttctggtggttcacgtgagtacatgggaagaggacctccaccaggaacaggtcgttgttttaactgtggaatggatggtcactgggcaagggactgcaaggctggtgactggaagaacaaatgctaccgctgtggtgaatcgggccatatagagagaaattgccagaacagtccaaggaatctcaggcgtgataaaagctattcacggtctccatccccacgtggtggacgtggccgcagccggagctacagcagaagccggagctatagccgatccagatccccatctggatctcccaggggtggacgccgtgaacgtgacgagaggagatctaggagtcttagctacagcaggagcgcaagccccaggcgttctgtgtcacctgtaaaggaaaaggagcgcagccgcacacctgatggcagtaggagccccagcccaagggacaaggtgagcccaccaccaaaggataatggtgcccacaatggctcggaccgtgaagacagccctgggggcagggagatgagcaagaggagtcggagcccgtctgatggctaccgtagccctgtgggcaatgggcgcagcccgagccgtagcccaagccccaaggtcaacaatggtgatgacccaagccccaagggcaacaatggtgacgacccaagccccaagggcaacaatggtgatgacgagcaccgcggttcaccaagaggaagtcagtccccctga

SEQ ID NO: 198 - protein, 325 aa, Zea mays
MPRYDDRHGNTRLYVGRLAPRTRSRDLEYLFSKYGRIREVELKRDYAFIEFSDPRDADDAQYNLDGREVDGSRIIVEFAKGVPRGSGGSREYMGRGPPPGTGRCFNCGMDGHWARDCKAGDWKNKCYRCGESGHIERNCQNSPRNLRRDKSYSRSPSPRGGRGRSRSYSRSRSYSRSRSPSGSPRGGRRERDERRSRSLSYSRSASPRRSVSPVKEKERSRTPDGSRSPSPRDKVSPPPKDNGAHNGSDREDSPGGREMSKRSRSPSDGYRSPVGNGRSPSRSPSPKVNNGDDPSPKGNNGDDPSPKGNNGDDEHRGSPRGSQSP

SEQ ID NO: 199 - DNA, 978 bp, Zea mays
atgcctcgcaatgatgatcgctatgggaatacacgcttgtatgttggaagattgtctccccgcacccgttctcgtgacctagaataccttttcagcaaatatgggagaattcgagaagtggagttgaagcgtgactatgcattcattgaattcagtgacccccgtgatgctgatgatgcacagtacaacctagatggcagggacgtcgatggaagccgcattattgttgaatttgctaaaggggttcctcgtggttctggtggttcacgtgattacaacggaagaggacctccaccaggaacaggccgttgttttaactgtggagttgatggtcactgggcaagagactgtcaggctggtgactggaagaacaaatgctaccgttgtggcgaaaggggccatatagaaagaaattgccagaacagtccaaggaacctcaggcgtgagagaagctattcacggtctccatccccacgccgaggacggggccgcagccggagctacagcagaagccggagctatagccgatccagatccccgtctggatctcctaggggtggacgccgagaccgtgatgagaggagatcaaggagtcttagctacagcaggagcgcaagccctaggcgttctgtgtcacctgtaaaggaaaaggagcgcagccgcacacctgatggcagtaggagccccagcccaagggacaaggtgagcccaccaccaaaggataatggtgcccacaatggctcggaccgtgaagacagccctgggggcagggagatgagcaagaggagtcggagcccgtctgatggctaccgtagccctgtgggcaatgggcgcagcccgagccgtagcccaagccccaaggtcaacaatggtgatgacccaagccccaagggcaacaatggtgacgacccaagccccaagggcaacaatggtgatgacgagcaccgcggttcaccaagaggaagtcagtccccctga

SEQ ID NO: 200 - protein, 325 aa, Zea mays
MPRNDDRYGNTRLYVGRLSPRTRSRDLEYLFSKYGRIREVELKRDYAFIEFSDPRDADDAQYNLDGRDVDGSRIIVEFAKGVPRGSGGSRDYNGRGPPPGTGRCFNCGVDGHWARDCQAGDWKNKCYRCGERGHIERNCQNSPRNLRRERSYSRSPSPRRGRGRSRSYSRSRSYSRSRSPSGSPRGGRRDRDERRSRSLSYSRSASPRRSVSPVKEKERSRTPDGSRSPSPRDKVSPPPKDNGAHNGSDREDSPGGREMSKRSRSPSDGYRSPVGNGRSPSRSPSPKVNNGDDPSPKGNNGDDPSPKGNNGDDEHRGSPRGSQSP

SEQ ID NO: 201 - DNA, 993 bp, Oryza glaberrima
atgcctcactatgatgatcattatggaagcacacgcttgtatgttggtagactgtcttcgcgcactcgttctcgtgacctagaatatcttttcggcagatatggaagaatacgtgaagtggagttgaagcgcgactacgcgtttattgaattcagtgatccccgtgatgctgatgaagcgcggtataacctagatggcagggatgttgatggaagccgcattcttgttgagtttgctaaaggagttccacgtggtgctgctggtggttcacgtgaatatatggggagaggacctcctccaggaacaggtcgctgttttaactgtgggattgatggtcactgggcaagagactgcaaggctggtgactggaagaacaaatgttaccgttgtggagaaagaggtcacatagaaagaaactgccaaaacagtccaagaaatctcaggcgagagagaagttattcgcgctccccatcgccacgccgtggacgtggtcatggtcgtagtcgtagctatagccggagccggagcaggagttacagccgatctaggtccagatccctatctggatctcccaggggacgcagagatcgtgatgataggagatcaaggagtcttagctacagcagaagtcccaggcgatccatctcccgagcagcaaatggaaaggagcgcagccccagcccgaatggtaggcggagtccaaggagtccacaggatcgggtaagcccaccacccaaggataatgatgagcgcaatggtgacagcccccggggcagggagaacagcaggagcccatctgacggctatcgtagccctgtggctgccaatgggcgcagcccaagcccaaggaacaatggaagccctagtccaatggacaacaatagccgaagcccaagggacaacggcagcccgagccctagggatggaaatggtgatggtggtagccgtggcggctcacgctcgcccagagcaagcgagtcccctgaagcttga

SEQ ID NO: 202 - protein, 330 aa, Oryza glaberrima
MPHYDDHYGSTRLYVGRLSSRTRSRDLEYLFGRYGRIREVELKRDYAFIEFSDPRDADEARYNLDGRDVDGSRILVEFAKGVPRGAAGGSREYMGRGPPPGTGRCFNCGIDGHWARDCKAGDWKNKCYRCGERGHIERNCQNSPRNLRRERSYSRSPSPRRGRGHGRSRSYSRSRSRSYSRSRSRSLSGSPRGRRDRDDRRSRSLSYSRSPRRSISRAANGKERSPSPNGRRSPRSPQDRVSPPPKDNDERNGDSPRGRENSRSPSDGYRSPVAANGRSPSPRNNGSPSPMDNNSRSPRDNGSPSPRDGNGDGGSRGGSRSPRASESPEA

SEQ ID NO: 203 - DNA, 993 bp, Oryza sativa
atgcctcgctatgatgatcattatggaagcacacgcttgtatgttggtagactgtcttcgcgcactcgttctcgtgacctagaatatcttttcggcagatatggaagaatacgtgaagtggagttgaagcgcgactacgcgtttattgaattcagtgatccccgtgatgctgatgaagcgcggtataacctagatggcagggatgttgatggaagccgcattcttgttgagtttgctaaaggagttccacgtggtgctgctggtggttcacgtgaatatatggggagaggacctcctccaggaacaggtcgctgttttaactgtgggattgatggtcactgggcaagagactgcaaggctggtgactggaagaacaaatgttaccgttgtggagaaagaggtcacatagaaagaaactgccaaaacagtccaagaaatctcaggcgagagagaagttattcgcgctccccatcgccacgccgtggacgtggtcatggtcgtagtcgtagctatagccggagccggagcaggagttacagccgatctaggtccagatccctatctggatctcccaggggacgcagagatcgtgatgataggagatcaaggagtcttagctacagcagaagtcccaggcgatccatctccccagcagcaaatggaaaggagcgcaaccccagcccgaatggtaggcggagtccaaggagtccacaggatcgggtaagcccaccacccaaggataatgatgagcgcaatggtgacagcccctggggcagggagaacagcaggagcccatctgacggctaccgtagccctgtggctgccaatgggcgcagcccaagcccaaggaacaatggaagccctagtccaatggacaacaatagccgaagcccaagggacaacggcagcccgagccctagggatggaaatggtgatggtggtagccgtggcggctcacgctcgcccagagcaagcgagtcccctgaagcttga

SEQ ID NO: 204 - protein, 330 aa, Oryza sativa
MPRYDDHYGSTRLYVGRLSSRTRSRDLEYLFGRYGRIREVELKRDYAFIEFSDPRDADEARYNLDGRDVDGSRILVEFAKGVPRGAAGGSREYMGRGPPPGTGRCFNCGIDGHWARDCKAGDWKNKCYRCGERGHIERNCQNSPRNLRRERSYSRSPSPRRGRGHGRSRSYSRSRSRSYSRSRSRSLSGSPRGRRDRDDRRSRSLSYSRSPRRSISPAANGKERNPSPNGRRSPRSPQDRVSPPPKDNDERNGDSPWGRENSRSPSDGYRSPVAANGRSPSPRNNGSPSPMDNNSRSPRDNGSPSPRDGNGDGGSRGGSRSPRASESPEA

SEQ ID NO: 205 - DNA, 993 bp, Panicum virgatum
atgcctcgctatgatgatcgctatggaggaacgcgcttgtatgttggcagattggcctcccgtactcgttcccgcgacctagaatatctgttcagcagatatggaagaatacgagaagtggagttgaagcgcgactatgcattcattgagttcagtgatcctcgtgatgctgatgatgcgcgatacaacctagatggcagggatgttgatgggagtcgcattattgttgagtttgctaaaggcgttccacgcggaccaggtggctcacgtgaatccatgggaagaggccctcccccgggaacaggtcgttgtttcaactgtggaattgatggtcactgggcgagagactgtaaggctggtgactggaaaaataaatgctaccgatgtggagaaaggggacatatagaaagaaattgccagaacagccctaggagtatcaggcgtgagagaagctactcacggtccccatctccacgccatggacggggccgcagtcggagctacagcagaagtcggagccggagccgtagcaatagccgctcaagatccctatctggatctcctaggggaggccgccgtgaccgtggtgagaggagatcaaggagccttagctacagcaggagccccatgcgatctgcctcccctcctgcaaaggagcacagccgtacacctgatggaagcaggagcccaaggagtcccagtccccggggtcaggtgagcccaccgccaaaggataacggtgagcgcaatggctcagaccgtggtgatagccctggagggatggagaaggagaacagcaggagtagaagccggagcccatctgatggcaaccgcagccctgcggccaatgggcgtagcccaagtcctagggatgaccgtagcccaagccctactaggggtgaccgcagtccaagtcccaagggcaatggtaacaatgatgatgatcatgatgatgaccggcaggcttcacccacaggaagcaagtccccctga

SEQ ID NO: 206 - protein, 330 aa, Panicum virgatum
MPRYDDRYGGTRLYVGRLASRTRSRDLEYLFSRYGRIREVELKRDYAFIEFSDPRDADDARYNLDGRDVDGSRIIVEFAKGVPRGPGGSRESMGRGPPPGTGRCFNCGIDGHWARDCKAGDWKNKCYRCGERGHIERNCQNSPRSIRRERSYSRSPSPRHGRGRSRSYSRSRSRSRSNSRSRSLSGSPRGGRRDRGERRSRSLSYSRSPMRSASPPAKEHSRTPDGSRSPRSPSPRGQVSPPPKDNGERNGSDRGDSPGGMEKENSRSRSRSPSDGNRSPAANGRSPSPRDDRSPSPTRGDRSPSPKGNGNNDDDHDDDRQASPTGSKSP

SEQ ID NO: 207 - DNA, 996 bp, Physcomitrella patens
atgtctcgatatgatgatcgctacagaggcagcgacaggcgcgatgatcgaggcggaggtggaggaggttaccgtggtggtggtggtggtggtagaggtgccgatactggccctgatgctggagccactcgtttgtatgtcggccgtctttctacccgaacaagaagccgagatttggaagacctcttcgcgaaatatgggagagttcgagacgtggatgtgaagcacgactttgcctttgttgaattcgccgatgctcgagatgcggatgatgcaagacattatgtgaacgggaaagactttgatggcaacaggctcattgttgagtttgcgaggaggggaccccgcggtgcctcaggtggtgctcgtgaatatcttgggagaggcccgcctcctggcactggtcgttgttataattgtggaaatgatggccattgggcgagagattgcaaagcaggtgattggagggataagtgctatcggtgcggccagcgtgggcacatagagcgtaattgccgcaacagtccaaggccgacaagcagtccgtcgcgttcccgctctcggtctcctcgagggcacaagaggtcgtctcgcagaagtgtttcccgtagccgaagtcgcagcttcagtcgttcacctcctcgaaggggtcgtagtcctgctaaggctgaccgcagtcccatgaaggatgatcgtagtcctgccaagggtgaccgtagaaagtcagatcgcagcaaaagcaggagcctgactcctctgcctaaggatgagaaacgtagtctttctcccagccctgtccccaacgggagaagtataagcagaagccccggagctcgtagtccgagtccagaggctcatcgtggtgagcaaagtcctccaccccgagagaagaggcgtagtatcagccctagcccagagcaagacttggataagggtagtcctgctaaggatctttcacccctacctcgaaggagtcttactcccgaagaagagtga

SEQ ID NO: 208 - protein, 331 aa, Physcomitrella patens
MSRYDDRYRGSDRRDDRGGGGGGYRGGGGGGRGADTGPDAGATRLYVGRLSTRTRSRDLEDLFAKYGRVRDVDVKHDFAFVEFADARDADDARHYVNGKDFDGNRLIVEFARRGPRGASGGAREYLGRGPPPGTGRCYNCGNDGHWARDCKAGDWRDKCYRCGQRGHIERNCRNSPRPTSSPSRSRSRSPRGHKRSSRRSVSRSRSRSFSRSPPRRGRSPAKADRSPMKDDRSPAKGDRRKSDRSKSRSLTPLPKDEKRSLSPSPVPNGRSISRSPGARSPSPEAHRGEQSPPPREKRRSISPSPEQDLDKGSPAKDLSPLPRRSLTPEEE

SEQ ID NO: 209 - DNA, 996 bp, Saccharum officinarum
  misc_feature (699)..(699): n is a, c, g, or t
  misc_feature (857)..(857): n is a, c, g, or t
atgcctcgctatgatgaccgctatggaggcacgcgcttgtatgttggcagattggcccctcgtactcgttcccgcgatttagaaaatctgttcggcagatatggaagaatacgagaagtggagttgaagcgcgactatgcatttattgagttcagtgatcatcgtgatgctgatgaggctcgataccaactagatggcagggatgttgatgggagtcgcattgttgttgagtttgccaaaggggtcccacgtggtccagctggctcacgtgaatatatgggaagaggccctccaccaggtacaggtcgttgtttcaactgtggaattgatggtcactgggcaagagactgtaaggctggtgactggaaaaacaaatgctaccgttgtggagaaagagggcatatagaaagaaattgccagaacagtcctaggagtgtcaggcgtgaaagaagttactcacggtccccaactccacgccgtggaaggggtcgcagtccaagctatagcaggagcaggagcaggagccggagctatagccggtcgagatccctgtctggatctcctaggggaggtcgccgtgaccgtaaccgtgacgataggagatcaaggagccttagctacagcaggagtcccatgcgatctgcctcgccacctccaaaggaaagggagcgcagccccacacctaatggaagcaggagncccaggagtcgcagcccccaggatcaggtgatgagcccaccaccaaaggataatggcgaaggtaatggttcagaccgtggcgacagccccagagggagggaaaacagcaggagcaggagccgcagcccatcccgtggtaaccgcagccctgcagctantgggagtagcccgagtcctagaggtgaccgtagtccaagccccagggctgaccgtagcccaagccccaagggcaatgtaacaaggacgatgatgatgctgccccccgtggttccccagcaggaagcaagtcacccttga

SEQ ID NO: 210 - protein, 331 aa, Saccharum officinarum
  misc_feature (233)..(233): Xaa can be any naturally occurring amino acid
  misc_feature (286)..(286): Xaa can be any naturally occurring amino acid
MPRYDDRYGGTRLYVGRLAPRTRSRDLENLFGRYGRIREVELKRDYAFIEFSDHRDADEARYQLDGRDVDGSRIVVEFAKGVPRGPAGSREYMGRGPPPGTGRCFNCGIDGHWARDCKAGDWKNKCYRCGERGHIERNCQNSPRSVRRERSYSRSPTPRRGRGRSPSYSRSRSRSRSYSRSRSLSGSPRGGRRDRNRDDRRSRSLSYSRSPMRSASPPPKERERSPTPNGSRXPRSRSPQDQVMSPPPKDNGEGNGSDRGDSPRGRENSRSRSRSPSRGNRSPAAXGSSPSPRGDRSPSPRADRSPSPKGNVTRTMMMLPPVVPQQEASHP

SEQ ID NO: 211 - DNA, 996 bp, Zea mays
atgcctcgctatgatgatcgctatggaggcacgcgcttgtatgttggcagattggccccccgtactcgttctcgtgatttagaatatctcttcggcaaatatggaagaatacgagaagtggagttgaagcgcgactatgcatttattgagttcagtgaacatcgtgatgccgatgaagctcggtaccaactagatggcagggatgtcgatggaagtcgcattgttgttgagtttgctaaaggggtcccacgtggtccaggtggctcacgtgaatatatgggaagaggccctccaccaggcacaggtcgttgtttcaactgtggaatggatggtcactgggcaagagactgtaaggctggtgactggaaaaataaatgctaccgttgtggagaaagagggcatatagaaagaaattgccagaacagtcctaggagcgtcaggcgtgaaagaagttactcacgctccccatctccacgccgtggaagaggtcgcagtccaagctatagcaggagcaggagccggagccggagccggagctatagccgatcgaggtccctatctggatctcctaggggaggccgccgtgaccgtgatgataggagatcgaggagtcttagctacagcaggagccccgtgcggtcgccacctgcaaaggaaaaggagcgcagtcccacacctggcggaagcaggagcccaaggagtcgcagcccacaggatcaggtgatgagcccaccacctaaggataacggcgacaggaatggttcagaccgtggcgacagccccagagggagggaagacagcaggagccgcagccgcagcccatccggtggtaaccgcagccctgcagctaatgggcgtagcccgagccccagaggtgaccgtggcccgagccccatggctgaccgtagcccgagcccaaagggcaatggtaacaacgatggtggtgatgatgatactggccgtggtggttcccccacaggaagcaagtcaccctga

SEQ ID NO: 212 - protein, 331 aa, Zea mays
MPRYDDRYGGTRLYVGRLAPRTRSRDLEYLFGKYGRIREVELKRDYAFIEFSEHRDADEARYQLDGRDVDGSRIVVEFAKGVPRGPGGSREYMGRGPPPGTGRCFNCGMDGHWARDCKAGDWKNKCYRCGERGHIERNCQNSPRSVRRERSYSRSPSPRRGRGRSPSYSRSRSRSRSRSYSRSRSLSGSPRGGRRDRDDRRSRSLSYSRSPVRSPPAKEKERSPTPGGSRSPRSRSPQDQVMSPPPKDNGDRNGSDRGDSPRGREDSRSRSRSPSGGNRSPAANGRSPSPRGDRGPSPMADRSPSPKGNGNNDGGDDDTGRGGSPTGSKSP

SEQ ID NO: 213 - DNA, 999 bp, Mesembryanthemum crystallinum
atgcctcgctacagtgaccgtcacagtagtagcagtacacgcctctatgttggccgcctgtcttcacgtaccaggacccatgatttggaggaccttttcagcagatatggaagagtacgtgacgtggatatgaagcgtgattatgcctttgttgaatatagtgatcctcgtgatgctgatgatgcaagatatagtttaaatggtcgagatgttgatggtagtcgaatcattgtggagtttgccaaggggggaccacgaggcccaggaggttcacgtgactttgggggcagaggaccacccccaggatcagggagatgtttcaattgtggaattgatggccactgggcccgggattgcaaagcgggtgactggaaaaacaagtgttaccgctgtggagagcgtggtcatatagaaagaaactgccaaaacagtcccaagaaactaaaacgtggtcggagttattcgcgttcaccatcaccccgccgacgttcagcatctcctcgccgtggcagaagccgaagtcgcagtttcagcaggagccgtagctacagtcaatctagatcaccaccaaggagagaccgggctgtcgagcgtgtggacaggtcaaggagccctcgtgcaagcaggagccccaaacgacagaagggttctcctgtgtcaaccagggtggccagaaagcgcaccccatcacctgatgataggtctccgcgaggcagagacagcccctctcctagggatgagaggcgtgctaatggttctgattatggtgggagccctaggcctaggaccagaagccctgggccaaggagcaggagcaggagcaggagcagaagccccatggatgaagctgaaagagaaagcccccggaatggaaatgctcgaagtccgtttgaggagaacggacgagatcgcagtgcaagccctgtggctaggaatgacaggagtggaagggatgatgatgatgacgactatcagatttctcccagaggcagtgaataa

SEQ ID NO: 214 - protein, 332 aa, Mesembryanthemum crystallinum
MPRYSDRHSSSSTRLYVGRLSSRTRTHDLEDLFSRYGRVRDVDMKRDYAFVEYSDPRDADDARYSLNGRDVDGSRIIVEFAKGGPRGPGGSRDFGGRGPPPGSGRCFNCGIDGHWARDCKAGDWKNKCYRCGERGHIERNCQNSPKKLKRGRSYSRSPSPRRRSASPRRGRSRSRSFSRSRSYSQSRSPPRRDRAVERVDRSRSPRASRSPKRQKGSPVSTRVARKRTPSPDDRSPRGRDSPSPRDERRANGSDYGGSPRPRTRSPGPRSRSRSRSRSPMDEAERESPRNGNARSPFEENGRDRSASPVARNDRSGRDDDDDDYQISPRGSE

SEQ ID NO: 215 - DNA, 999 bp, Triticum aestivum
atgcctcgttatgatgatcgttatggaaacgcacgcctgtatgttggtagattgtcctcccgtactcgttcgcgcgacctagaatatcttttcagcaaatatggaagaatacgggaagtggaattgaagcgcgactatgcattcattgaatacagtgatcctcgtgatgctgatgatgcccgatacaatctagatggcagggatgttgatgggagccgcattattgttgagtttgctaaaggggttccacgtggttctggtggttcacgagaacgtgaatatgtgggaagaggccctcctccaggaacaggccgttgtttcaactgtggtattgatggtcactgggccagggactgcaaggctggtgactggaagaacaaatgctaccgctgtggagaaaggggccatatagaaagaaattgccagaatagtccgaggagtctcaggcgtgagagaagctattcacggtccccatctccacgtcgtggacgggcccgcagtcggagctacagcagaagccgtagttacagccgatctaggtccagatcttattctgaatctcccagagggcgccgcacagagcgtgatgagaggagatcaaggagcatcagctacagcaggagccccaggcgatcactctccccagaagctaaggaaatggatcgcagccccacacctgatcgcagtcggagccccaggcgatccatctcacctgtagcaaaggataatggtgatagccctcggggcagggataagagcaggagcccttctgatggctaccgcagccctgtggccaatgggcgcagtccaagccctgctaacaatggcaatcccagtcctaccagggacaacaggggcagtccaagcccgaggggcaacaatggtagccctagtcccaagggcaatggcgatggtggcagcccaagtccaaggggcaatggtgacgatgatggccgtcgcggctcaggctcacctagaggaagaagcgtgactccctga

SEQ ID NO: 216 - protein, 332 aa, Triticum aestivum
MPRYDDRYGNARLYVGRLSSRTRSRDLEYLFSKYGRIREVELKRDYAFIEYSDPRDADDARYNLDGRDVDGSRIIVEFAKGVPRGSGGSREREYVGRGPPPGTGRCFNCGIDGHWARDCKAGDWKNKCYRCGERGHIERNCQNSPRSLRRERSYSRSPSPRRGRARSRSYSRSRSYSRSRSRSYSESPRGRRTERDERRSRSISYSRSPRRSLSPEAKEMDRSPTPDRSRSPRRSISPVAKDNGDSPRGRDKSRSPSDGYRSPVANGRSPSPANNGNPSPTRDNRGSPSPRGNNGSPSPKGNGDGGSPSPRGNGDDDGRRGSGSPRGRSVTP

SEQ ID NO: 217 - DNA, 999 bp, Triticum monococcum
atgcctcgctacgatgagcgtgatcgttacggcggcaacacaaggctgtacgtgggtcgtcttccctcgcgcacccgcacaagggaccttgaagacctcttcggcagatatgggagagtgcgacatgtggatatgaagcacgagtttgcatttgttgagtttagtgatcccagggatgctgatgaagcaaggtacaatcttgatggtcgtgactttgatggaagccgcatgattgttgagtttgctaaaggggttccgcgtggccaaggaggaggaggtgaccgtgaccgtggccgtggcggtgaccgtgaatatatgggtcggggacctcctcctggttctggccgttgctttaactgtgggattgatgggcattgggctcgtgactgcaaagctggcgactggaaaaataggtgctatcgttgtggagatagtggccacatagaaagggattgccagaacagccctaagaacctcaagcgtggaaagagttactccagatctccatctcctcgccgtggaagggtgcgtgataggagctacagcaggagccgcagtaggagctacagccgctctgtttccccaaggagggatgaaaggcgctcaaggagcccccgtgacagtcgcagccccaggaggagcccccgcgacagtcgcagccccaggaggagcccccgcgacagtcgcagccctatgaagagcccccgtggcagtcgcagccctatgaggagcccccgtgacagccgcagccctaggaggagcgcttcacctgccaaggggagggcccggagccccacccctcctggcagcaggagccctgcaccaagggaaaacagcaggagccctgcaccaagggaaaacagcaggagcccaatgaaggcagacagccctaataacatgagcccagctgcaaatggtcgtagcccgagccccagggacggccaagacaatggcaaccaccgcgcacccagtggaagtgcatcacccggtggtggttga

SEQ ID NO: 218 - protein, 332 aa, Triticum monococcum
MPRYDERDRYGGNTRLYVGRLPSRTRTRDLEDLFGRYGRVRHVDMKHEFAFVEFSDPRDADEARYNLDGRDFDGSRMIVEFAKGVPRGQGGGGDRDRGRGGDREYMGRGPPPGSGRCFNCGIDGHWARDCKAGDWKNRCYRCGDSGHIERDCQNSPKNLKRGKSYSRSPSPRRGRVRDRSYSRSRSRSYSRSVSPRRDERRSRSPRDSRSPRRSPRDSRSPRRSPRDSRSPMKSPRGSRSPMRSPRDSRSPRRSASPAKGRARSPTPPGSRSPAPRENSRSPAPRENSRSPMKADSPNNMSPAANGRSPSPRDGQDNGNHRAPSGSASPGGG

SEQ ID NO: 219 - DNA, 1002 bp, Citrus clementina
atgcctcgttatgatgaccggtacggtggtacgcgtctctatgttggacgcttggcttcacggacaagatcacgtgatcttgaggagatcttcagcagatatgggagaattcgcgatgtggatatgaagcgtgacttcgcctttgttgaatttagcgaccctcgtgatgctgacgatgcaagatatagcttaaatggtcgggatgttgatggaagccgtatcattgtggaatttgcaagaggggggccacgtggtcctggtggatctcgtgagtatcttggtcgaggccctcctcctggatctgggcgctgcttcaattgtgggattgatggccattgggctcgagactgcaaggctggagactggaagaataagtgttatcgctgtggtgaacgaggccacatagaacgaaattgtcaaaacagtccaaagaagttaaggaggcctcggagttattcacgttctccaagtcctcgtcgtggtagaagcaggagccgtagttacagtagaggccgcagcgacagccgatcacgatcgcctgtcaagagagataggagtgttgaacgttttgagagaagaacaaggagcccccgagacagtaggagccctaagcgtcgcagaaattcaccaccatcatctaaaggtaggaagcgtagtccaaccccagatgaaagaagtccacaagatcaacgtagcccatccccaagggaccggaggcaggctaatggatcagagtacagtggcagtccaaggggaaagagcagaagccctgtagacgatgccgatggccctgaggataggaattacaggagccctcccgaagaaatggccgcagccgaagccgcagccgcagccttagtccagtccctagggatgataggagcccaattgatgatgatgataatcatggggaccctaaaggcagcgaatcaaattaagtggcgggttaggtttcatgttgggatcgactccctccgaaagttgtttggaacaaatttataa

SEQ ID NO: 220 - protein, 333 aa, Citrus clementina
MPRYDDRYGGTRLYVGRLASRTRSRDLEEIFSRYGRIRDVDMKRDFAFVEFSDPRDADDARYSLNGRDVDGSRIIVEFARGGPRGPGGSREYLGRGPPPGSGRCFNCGIDGHWARDCKAGDWKNKCYRCGERGHIERNCQNSPKKLRRPRSYSRSPSPRRGRSRSRSYSRGRSDSRSRSPVKRDRSVERFERRTRSPRDSRSPKRRRNSPPSSKGRKRSPTPDERSPQDQRSPSPRDRRQANGSEYSGSPRGKSRSPVDDADGPEDRNYRSPPEEMAAAEAAAAALVQSLGMIGAQLMMMIIMGTLKAANQIKWRVRFHVGIDSLRKLFGTNL

SEQ ID NO: 221 - DNA, 1002 bp, Hordeum vulgare
atgcctcgttacgatgatcgttatggaaacgcacgcttgtatgttggtagattgtcctcccgtactcgttcgcgcgacctagaatatcttttcagcaaatatggaagaatacgggaagtggaattgaagcgcgactatgcattcattgaattcagtgattctcgtgatgctgatgaagcccggtacaatctagatggcagggatgttgatgggagccgcattattgttgagtttgctaaaggggttccacgtggttctggtggttcacgagagcgtgaatatgtggggagagggcctcctccaggaacaggccgttgtttcaactgtggtatagatgggcattgggccagggattgcaaggctggtgactggaagaacaaatgctaccgctgtggagaaagaggccatatagagagaaattgccagaatagcccgaggagtctcaggcgtgagagaagctattcacggtccccatctccacgtcgtggacgggcccgcagtcggagctacagcagaagccgtagttacagccgatctaggtccagatcttactcagagtctccgagagggcgtcgcacagagcgtgatgagaggagatcgaggagcattagctacagcaggagccccaggcgatcactctccccagaagctaaggaaatggaccgtagccccacacctgatcgcagtcggagccccaggcgatccatctcccctgtagcaaaggataatggtgacagccctcggggcaggaggacaagcaggagcccttctgatggctaccgtagccctgtggccaatgggcgcagccctagaagccctgctaacaatggcagtcccagtcctgccagggacaacaagggcagtccaagcccgaggggcaacaacggtagccctagtcctaagggcaatggtaatggtggcagcccaagtccaagaggcaatggtgacggtgatggccttcgcggctctggctcacccagaggaagaagcgcgtctccctga

SEQ ID NO: 222 - protein, 333 aa, Hordeum vulgare
MPRYDDRYGNARLYVGRLSSRTRSRDLEYLFSKYGRIREVELKRDYAFIEFSDSRDADEARYNLDGRDVDGSRIIVEFAKGVPRGSGGSREREYVGRGPPPGTGRCFNCGIDGHWARDCKAGDWKNKCYRCGERGHIERNCQNSPRSLRRERSYSRSPSPRRGRARSRSYSRSRSYSRSRSRSYSESPRGRRTERDERRSRSISYSRSPRRSLSPEAKEMDRSPTPDRSRSPRRSISPVAKDNGDSPRGRRTSRSPSDGYRSPVANGRSPRSPANNGSPSPARDNKGSPSPRGNNGSPSPKGNGNGGSPSPRGNGDGDGLRGSGSPRGRSASP

SEQ ID NO: 223 - DNA, 1002 bp, Triticum aestivum
atgcctcgttatgatgatcgttatggaaatgcacgcttgtatgttggtagattgtcctcccgtactcgttcgcgtgacctagaatatcttttcagcaaatatggaagaatacgggaagtggaattgaagcgcgactatgcattcattgaatacagtgatcctcgtgatgctgatgaggcccgatacaacctagatggcagggatgttgatgggagccgcattattgttgagtttgctaaaggggttccacgtggttctggtggttcacgagaacgtgaatatgtgggaagagggcctcctccaggaacaggccgttgtttcaactgtggtattgatggtcattgggccagggactgcaaagctggtgactggaagaacaaatgctaccgctgtggagaaaggggccatattgaaagaaattgccagaatagcccgaggagtctcaggcgtgagagaagctattcacggtccccatctccacgtcgtggacgggctcgcagtcggagctacagcagaagccgtagttacagccgatctaggtccagatcctattctgaatctcccagagggcgccgcacagagcgtgatgagaggagatcaaggagcattagctacagcaggagccccaggcgatcactctccccaggaggcaaggaaatggatcgcagccccacacctgatcgcagtcggagccccaggcgatccatctcacctgtagcaaaggataatggtgatagccctcggggcagggagacaagcaggagcccatctgatggctaccgtagccctgtggccaatgggcgcagcccaagaagccctgttaacaatggcagtcccagtcctaccagagacaacagggccagtccaagcctgaggggcaacaacggtagccctagtcctaagggcaatggcaacggtggcagcccaagtccaaggggcaatggtgacgacgatggacgtcgaggctcaggctcacctagaggaagaagcgtgtctccatga

SEQ ID NO: 224 - protein, 333 aa, Triticum aestivum
MPRYDDRYGNARLYVGRLSSRTRSRDLEYLFSKYGRIREVELKRDYAFIEYSDPRDADEARYNLDGRDVDGSRIIVEFAKGVPRGSGGSREREYVGRGPPPGTGRCFNCGIDGHWARDCKAGDWKNKCYRCGERGHIERNCQNSPRSLRRERSYSRSPSPRRGRARSRSYSRSRSYSRSRSRSYSESPRGRRTERDERRSRSISYSRSPRRSLSPGGKEMDRSPTPDRSRSPRRSISPVAKDNGDSPRGRETSRSPSDGYRSPVANGRSPRSPVNNGSPSPTRDNRASPSLRGNNGSPSPKGNGNGGSPSPRGNGDDDGRRGSGSPRGRSVSP

SEQ ID NO: 225 - DNA, 1002 bp, Zea mays
atgcctcgctatgatgatcgctatggaggcacgcgcttgtatgttggcagattggccccccgtactcgttctcgtgatttagaatatctcttcggcaaatatggaagaatacgagaagtggagttgaagcgcgactatgcatttattgagttcagtgaacatcgtgatgccgatgaagctcggtaccaactagatggcagggatgtcgatggaagtcgcattgttgttgagtttgctaaaggggtcccacgtggtccaggtggctcacgtgaatatatgggaagaggccctccaccaggcacaggtcgttgtttcaactgtggaatggatggtcactgggcaagagactgtaaggctggtgactggaaaaataaatgctaccgttgtggagaaagagggcatatagaaagaaattgccagaacagtcctaggagcgtcaggcgtgaaagaagttactcacgctccccatctccacgccgtggaagaggtcgcagtccaagctatagcaggagcaggagtcgtagccggagccggagctatagccgatcgaggtccctatctggatctcctaggggaggccgccgtgaccgtgatgataggagatcgaggagtcttagctacagcaggagccccgtgcggtcgccccctgcaaaggaaaaggagcgcagtcccacacctggcggaagcaggagcccaaggagccgcagcccacaggatcaggtgatgagcccaccacctaaggataacggcgacaggaatggttcagaccgtggcgacagccccagagggagggaaaacagcaggagccgcagccgcagccgcagcccatccggtggtaaccgcagccctgcagctaatgggcgtagcccgagccccagaggtgaccgtaccccgagccccatggctgaccgtagcccgagcccaaagggcaatggtaacaacgatggtggtgatgatgatactggccgtggtggttcccccacaggaagcaagtcaccctga

SEQ ID NO: 226 - protein, 333 aa, Zea mays
MPRYDDRYGGTRLYVGRLAPRTRSRDLEYLFGKYGRIREVELKRDYAFIEFSEHRDADEARYQLDGRDVDGSRIVVEFAKGVPRGPGGSREYMGRGPPPGTGRCFNCGMDGHWARDCKAGDWKNKCYRCGERGHIERNCQNSPRSVRRERSYSRSPSPRRGRGRSPSYSRSRSRSRSRSYSRSRSLSGSPRGGRRDRDDRRSRSLSYSRSPVRSPPAKEKERSPTPGGSRSPRSRSPQDQVMSPPPKDNGDRNGSDRGDSPRGRENSRSRSRSRSPSGGNRSPAANGRSPSPRGDRTPSPMADRSPSPKGNGNNDGGDDDTGRGGSPTGSKSP

SEQ ID NO: 227 - DNA, 1002 bp, Zea mays
atgcctcgctatgatgatcgctatggaggcacgcgcttgtatgttggcagattggccccccgtactcgttctcgtgatttagaatatctcttcggcaaatatggaagaatacgagaagtggagttgaagcgcgactatgcatttattgagttcagtgaacatcgtgatgccgatgaagctcggtaccaactagatggcagggatgtcgatggaagtcgcattgttgttgagtttgctaaaggggtcccacgtggtccaggtggctcacgtgaatatatgggaagaggccctccaccaggcacaggtcgttgtttcaactgtggaatggatggtcactgggcaagagactgtaaggctggtgactggaaaaataaatgctaccgttgtggagaaagagggcatatagaaagaaattgccagaacagtcctaggagcgtcaggcgtgaaagaagttactcacgctccccatctccacgccgtggaagaggtcgcagtccaagctatagcaggagcaggagccggagccggagccggagctatagccgatcgaggtccctatctggatctcctaggggaggccgccgtgaccgtgatgataggagatcgaggagtcttagctacagcaggagccccatgcggtcgccacctgcaaaggaaaaggagcgcagtcccacacctggcggaagcaggagcccaaggagccgcagcccacaggatcaggtgatgagcccaccacctaaggataacggcgacaggaatggttcagaccgtggcgacagccccagagggagggaaaacagcaggagccgcagccgcagccgcagcccatccggtggtaaccgcagccctgcagctaatgggcgtagcccgagccccagaggtgaccgtaccccgagccccatggctgaccgtagcccgagcccaaagggcaatggtaacaacgatggtggtgatgatgatactggccgtggtggttcccccacaggaagcaagtcaccctga

SEQ ID NO: 228 - protein, 333 aa, Zea mays
MPRYDDRYGGTRLYVGRLAPRTRSRDLEYLFGKYGRIREVELKRDYAFIEFSEHRDADEARYQLDGRDVDGSRIVVEFAKGVPRGPGGSREYMGRGPPPGTGRCFNCGMDGHWARDCKAGDWKNKCYRCGERGHIERNCQNSPRSVRRERSYSRSPSPRRGRGRSPSYSRSRSRSRSRSYSRSRSLSGSPRGGRRDRDDRRSRSLSYSRSPMRSPPAKEKERSPTPGGSRSPRSRSPQDQVMSPPPKDNGDRNGSDRGDSPRGRENSRSRSRSRSPSGGNRSPAANGRSPSPRGDRTPSPMADRSPSPKGNGNNDGGDDDTGRGGSPTGSKSP

SEQ ID NO: 229 - DNA, 1008 bp, Oryza sativa
atgcctcgctatgatgatcattatggaagcacacgcttgtatgttggtagactgtcttcgcgcactcgttctcgtgacctagaatatcttttcggcagatatggaagaatacgtgaagtggagttgaagcgcgactacgcgtttattgaattcagtgatccccgtgatgctgatgaagcgcggtataacctagatggcagggatgttgatggaagccgcattcttgttgagtttgctaaaggagtaagcagttctttggttccacgtggtgctgctggtggttcacgtgaatatatggggagaggacctcctccaggaacaggtcgctgttttaactgtgggattgatggtcactgggcaagagactgcaaggctggtgactggaagaacaaatgttaccgttgtggagaaagaggtcacatagaaagaaactgccaaaacagtccaagaaatctcaggcgagagagaagttattcgcgctccccatcgccacgccgtggacgtggtcatggtcgtagtcgtagctatagccggagccggagcaggagttacagccgatctaggtccagatccctatctggatctcccaggggacgcagagatcgtgatgataggagatcaaggagtcttagctacagcagaagtcccaggcgatccatctccccagcagcaaatggaaaggagcgcaaccccagcccgaatggtaggcggagtccaaggagtccacaggatcgggtaagcccaccacccaaggataatgatgagcgcaatggtgacagcccctggggcagggagaacagcaggagcccatctgacggctaccgtagccctgtggctgccaatgggcgcagcccaagcccaaggaacaatggaagccctagtccaatggacaacaatagccgaagcccaagggacaacggcagcccgagccctagggatggaaatggtgatggtggtagccgtggcggctcacgctcgcccagagcaagcgagtcccctgaagcttga

SEQ ID NO: 230 - protein, 335 aa, Oryza sativa
MPRYDDHYGSTRLYVGRLSSRTRSRDLEYLFGRYGRIREVELKRDYAFIEFSDPRDADEARYNLDGRDVDGSRILVEFAKGVSSSLVPRGAAGGSREYMGRGPPPGTGRCFNCGIDGHWARDCKAGDWKNKCYRCGERGHIERNCQNSPRNLRRERSYSRSPSPRRGRGHGRSRSYSRSRSRSYSRSRSRSLSGSPRGRRDRDDRRSRSLSYSRSPRRSISPAANGKERNPSPNGRRSPRSPQDRVSPPPKDNDERNGDSPWGRENSRSPSDGYRSPVAANGRSPSPRNNGSPSPMDNNSRSPRDNGSPSPRDGNGDGGSRGGSRSPRASESPEA

SEQ ID NO: 231 - DNA, 1017 bp, Oryza sativa
atgtctcggtatgttgaccctaatgaccgttacgaaccacgtggtcgtaacagcaggttgtatgtgggccatatttctctacgtacaagggcagaggatcttgagaacctgttcagcagatatgggagggtgcgatttgtggatctgaagaatgaatatggctttgttgagtttagtgatccccgggatgcaaatgatgcgaggcttgatcttgatggccgaaagtatgatgggagtgacatcattgttcagtttgcaagaggggtcgaacgtggtcttggaggttctcgtggatataaagccagacccgcacatggttctgaccactgcttcaactgtgggatggaggggcactggcaccgtaactgcactgctggtgactggacaaataggtgctatggctgtggagagaggggtcatatattaagggaatgcaagaacagccccaaggatctcaagcaagagagaggctactcaaggtcccgttcacctcgtcgcagaaggagcccaagctatggcaagagtggacccccttctcattggggtagccatggtgctgatcgtgaggaaaggcttcattcaagaagggatggccgcggttacagccgcagccctcggcgccatgattcgccttccaatcagagaaaccacagccctaggcgctatgctttaccctccaatgagagatatgatggcactaggcgctacgcctcgccttcttatgggagagaccgcagtcccgggggcaatgctttgccagccaatgggagaagccacaacctcacatcagatggcatgaacccttcaccaagggagagagatgatcagaatgggagccacaggagaggtgacaacgattacctgcccagtaagagagatgatcagaatgggagctacaggagaggtgacagcgattacctctccagggagagagatgattacctgtccagggggagagatgatcagaatgggagccacaggagaggtgacagcgattacctgtcccgcgaccgttga

SEQ ID NO: 232 - protein, 338 aa, Oryza sativa
MSRYVDPNDRYEPRGRNSRLYVGHISLRTRAEDLENLFSRYGRVRFVDLKNEYGFVEFSDPRDANDARLDLDGRKYDGSDIIVQFARGVERGLGGSRGYKARPAHGSDHCFNCGMEGHWHRNCTAGDWTNRCYGCGERGHILRECKNSPKDLKQERGYSRSRSPRRRRSPSYGKSGPPSHWGSHGADREERLHSRRDGRGYSRSPRRHDSPSNQRNHSPRRYALPSNERYDGTRRYASPSYGRDRSPGGNALPANGRSHNLTSDGMNPSPRERDDQNGSHRRGDNDYLPSKRDDQNGSYRRGDSDYLSRERDDYLSRGRDDQNGSHRRGDSDYLSRDR

SEQ ID NO: 233 - DNA, 1026 bp, Sorghum bicolor
atgcctcgctatgatgaccgctatggaggcacgcgcttgtatgttggcagattggccccccgtactcgttcccgcgatttagaatatctgttcggcagatatgggagaatacgagaagtggagttgaagcgcgactatgcatttattgagttcagtgatcatcgtgatgctgatgaggctcgataccaactagatggcagggatgttgatgggagtcgcattgttgttgagtttgctaaaggggtcccacgtggtccaggtggctcacgtgaatatatgggaagaggccctccaccaggtaccggtcgttgtttcaactgtggaattgatggtcactgggcaagagactgtaaggctggtgactggaaaaacaaatgctaccgttgtggagaaagagggcatatagaaagaaattgccagaacagtcctaggagtgtcaggcgtgaaagaagttactcacggtccccatctccacgtcgtggaaggggtcgcagtccaagctatagtagaagcaggagcaggagccggagtcggagctatagccgatcgagatccctatctggatctcctaggggaggtcgccgtgaccgtgacgataggagatcaaggagtcttagctacagcaggagccccatgcgatctgcctcgccacctccaaaggaaaaggagcgcagccccacacctgatggaagcaggagcccaaggagtcgcagcccccaggatcaggtgatgagcccaccaccaaaggataacggcgaaggcaatggttcagaccgtggcgagagccccagaggaagggaaactagcaggagcaggagccgcagcaggagcccatccggtgataaccgcagccctgcagctaatgggcggagcccgagtcctagaggtgaccgtagcccaagccccagggctgaccgtagcccaagccccaaggctgaccgtagcccaagccccaagggcaatggtaacaatgacgatgatgatgctgcccgtggtgcttccccagcaggaagcaagtcaccctga

SEQ ID NO: 234 - protein, 341 aa, Sorghum bicolor
MPRYDDRYGGTRLYVGRLAPRTRSRDLEYLFGRYGRIREVELKRDYAFIEFSDHRDADEARYQLDGRDVDGSRIVVEFAKGVPRGPGGSREYMGRGPPPGTGRCFNCGIDGHWARDCKAGDWKNKCYRCGERGHIERNCQNSPRSVRRERSYSRSPSPRRGRGRSPSYSRSRSRSRSRSYSRSRSLSGSPRGGRRDRDDRRSRSLSYSRSPMRSASPPPKEKERSPTPDGSRSPRSRSPQDQVMSPPPKDNGEGNGSDRGESPRGRETSRSRSRSRSPSGDNRSPAANGRSPSPRGDRSPSPRADRSPSPKADRSPSPKGNGNNDDDDAARGASPAGSKSP

SEQ ID NO: 235 - DNA, 1062 bp, Zea mays
atgcctcgctatgatgaccgctatggaggcacgcgcttgtatgttggcagattggccactcgtactcgttcccgcgatttagaacatctgtttggcagatatggaagaatacgagaagtggagttgaagcgtgactatgcatttattgagttcagtgatcatcgcgatgctgatgaggctcgataccagctagatggcagggatgttgatgggagtcgtattgttgttgagtttgctaaaggggtcccacgtggttcaggtggctcacgtgaatatatggggagaggccctccaccaggtacaggtcgttgtttcaactgtggagttgatggtcactgggcaagagactgtaaagctggtgactggaaaaacaaatgctaccgttgtggagaaaggggccatatagaaagaaattgccagaacagtcctaggagtctcaggcgagagagaagttactcacggtccccatctccccgccgtggacggggccgcagtcgaagctatggcaggagcaggagccggagtcggagctatagtcgatcaagatccctgtctagatctcctaggggaggtcgtcgtgaccgtgacgataggagatcaaggagtcctagctatagcaggagccccatgcgatctgcctcgccaccagtaaaggaaaaggagcgcagccccgcacctgatggaagcagtagcccaaggagtcgcagcccccaggatcaggtgatgagcccaccaccaaaggataatggcgaaggcaatggctcagaccgtggcggcagccccagagggagggagaacagcaggagctgcagccgcagccgcagtccatctggtagtaaccgcagccctgcggccaatggacgtagccggagtcctggaggtgagcggagcccgagtcctggaggtgagcggagcccgagtcctagaggtgagcggagcccgagtcctagggctgaccgtagcccaagccccaatggcaatggtaacaatgatgctgctgctgatgtcgatgctgatgctgctgcccgcagtggctcccccactggaagcaagtcaccctga

SEQ ID NO: 236 - protein, 353 aa, Zea mays
MPRYDDRYGGTRLYVGRLATRTRSRDLEHLFGRYGRIREVELKRDYAFIEFSDHRDADEARYQLDGRDVDGSRIVVEFAKGVPRGSGGSREYMGRGPPPGTGRCFNCGVDGHWARDCKAGDWKNKCYRCGERGHIERNCQNSPRSLRRERSYSRSPSPRRGRGRSRSYGRSRSRSRSYSRSRSLSRSPRGGRRDRDDRRSRSPSYSRSPMRSASPPVKEKERSPAPDGSSSPRSRSPQDQVMSPPPKDNGEGNGSDRGGSPRGRENSRSCSRSRSPSGSNRSPAANGRSRSPGGERSPSPGGERSPSPRGERSPSPRADRSPSPNGNGNNDAAADVDADAAARSGSPTGSKSP

SEQ ID NO: 237 - DNA, 1062 bp, Zea mays
atgcctcgctatgatgaccgctatggaggcacgcgcttgtatgttggcagattggccactcgtactcgttcccgcgatttagaacatctgtttggcagatatggaagaatacgagaagtggagttgaagcgtgactatgcatttattgagttcagtgatcatcgcgatgctgatgaggctcgataccagctagatggcagggatgttgatgggagtcgtattgttgttgagtttgctaaaggggtcccacgtggttcaggtggctcacgtgaatatatggggagaggccctccaccaggtacaggtcgttgtttcaactgtggagttgatggtcactgggcaagagactgtaaagctggtgactggaaaaacaaatgctaccgttgtggagaaaggggccatatagaaagaaattgccagaacagtcctaggagtctcaggcgagagagaagttactcacggtccccatctccccgccgtggacggggccgcagtcgaagctatagcaggagcaggagccggagtcggagctatagtcgatcaagatccctgtctagatctcctaggggaggtcgtcgtgaccgtgacgataggagatcaaggagtcctagctatagcaggagccccatgcgatctgcctcgccaccagtaaaggaaaaggagcgcagccccgcacctgatggaagcaggagcccaaggagtcgcagcccccaggatcaggtgatgagcccaccaccaaaggataatggcgaaggcaatggctcagaccgtggcggcagccccagagggagggagaacagcaggagctgcagccgcagccgcagtccatctggtagtaaccgcagccctgcggccaatggacgtagccggagtcctggaggtgagcggagcccgagtcctggaggtgagcggagcccgagtcctagaggtgagcggagcccgagtcctagggctgaccgtagcccaagccccaatggcaatggtaacaatgatgctgctgctgatgtcgatgctgatgctgctgcccgcagtggctcccccactggaagcaagtcaccctga

SEQ ID NO: 238 - protein, 353 aa, Zea mays
MPRYDDRYGGTRLYVGRLATRTRSRDLEHLFGRYGRIREVELKRDYAFIEFSDHRDADEARYQLDGRDVDGSRIVVEFAKGVPRGSGGSREYMGRGPPPGTGRCFNCGVDGHWARDCKAGDWKNKCYRCGERGHIERNCQNSPRSLRRERSYSRSPSPRRGRGRSRSYSRSRSRSRSYSRSRSLSRSPRGGRRDRDDRRSRSPSYSRSPMRSASPPVKEKERSPAPDGSRSPRSRSPQDQVMSPPPKDNGEGNGSDRGGSPRGRENSRSCSRSRSPSGSNRSPAANGRSRSPGGERSPSPGGERSPSPRGERSPSPRADRSPSPNGNGNNDAAADVDADAAARSGSPTGSKSP

SEQ ID NO: 239 - DNA, 1101 bp, Saccharum officinarum
atgcctcgctatgatgaccgctatggaggcacgcgcttgtatgttggcagattggcccctcgtactcgttcccgcgatttagaaaatctgttcggcagatatggaagaatacgagaagtggagttgaagcgcgactatgcatttattgagttcagtgatcatcgtgatgctgatgaggctcgataccaactagatggcagggatgttgatgggagtcgcattgttgttgagtttgccaaaggggtcccacgtggtccaggtggctcacgtgaatatatgggaagaggccctccaccaggtacaggtcgttgtttcaactgtggaattgatggtcactgggcaagagactgtaaggctggtgactggaaaaacaaatgctaccgttgtggagaaagagggcatatagaaagaaattgccagaacagtcctaggagtgtcaggcgtgaaagaagttactcacggtccccaactccacgccgtggaaggggtcgcagtccaagctatagcagaagcaggagcaggagctatagccgatcgagatccctgtctggatctcctaggggaggtcgccgtgaccgtgacgataggagatcaaggagccttagctacagcaggagtcccatgcgatctgcctcgccacctccaaaggaaagggagcgcagccccacacctgatggaagcaggagcccaaggagtcgcagcccccaggatcaggtgatgagcccaccaccaaaggataatgacgaaggtaatggttcagaccgtggcgacagccccagagggagggaaaacagcatgagcaggagccgcagccgcagccgcagccggagcccatccggtggtaaccgcagccctgcagctaatgggcgtagcccgagtcctaaagtgaccggtatccaagccccagggcttaccgtagcccaagccccaagggccgtggtaacaacaaccatgctgatgcttcccccggttgttcccttgcaggaagccaggtcacctttaagtttgaacgctgccccttcccatttgtggggctttttgatgcaaggggcaaactttttatgcataactattttttcttccccttttttaaagaactga

SEQ ID NO: 240 - protein, 366 aa, Saccharum officinarum
MPRYDDRYGGTRLYVGRLAPRTRSRDLENLFGRYGRIREVELKRDYAFIEFSDHRDADEARYQLDGRDVDGSRIVVEFAKGVPRGPGGSREYMGRGPPPGTGRCFNCGIDGHWARDCKAGDWKNKCYRCGERGHIERNCQNSPRSVRRERSYSRSPTPRRGRGRSPSYSRSRSRSYSRSRSLSGSPRGGRRDRDDRRSRSLSYSRSPMRSASPPPKERERSPTPDGSRSPRSRSPQDQVMSPPPKDNDEGNGSDRGDSPRGRENSMSRSRSRSRSRSPSGGNRSPAANGRSPSPKVTGIQAPGLTVAQAPRAVVTTTMLMLPPVVPLQEARSPLSLNAAPSHLWGFLMQGANFLCITIFSSPFLKN

SEQ ID NO: 241 - protein, 50 aa, Artificial sequence
  motif 1
  VARIANT (5)..(5): / replace = "Thr"
  VARIANT (13)..(13): / replace = "Leu"
  VARIANT (44)..(44): / replace = "Lys"
  VARIANT (48)..(48): / replace = "Arg"
  VARIANT (49)..(49): / replace = "Asn"
PPPGSGRCFNCGIDGHWARDCKAGDWKNKCYRCGERGHIERNCQNSPKKL

SEQ ID NO: 242 - protein, 50 aa, Artificial sequence
  motif 2
  VARIANT (1)..(1): / replace = "Leu"
  VARIANT (3)..(3): / replace = "Gly"
  VARIANT (4)..(4): / replace = "Lys"
  VARIANT (8)..(8): / replace = "Ile"
  VARIANT (10)..(10): / replace = "Glu"
  VARIANT (12)..(12): / replace = "Glu"
  VARIANT (13)..(13): / replace = "Leu"
  VARIANT (15)..(15): / replace = "His"
  VARIANT (17)..(17): / replace = "Phe"
  VARIANT (20)..(20): / replace = "Ile"
  VARIANT (29)..(29): / replace = "Glu"
  VARIANT (30)..(30): / replace = "Glu"
  VARIANT (34)..(34): / replace = "Ser"
  VARIANT (36)..(36): / replace = "Phe"
  VARIANT (40)..(40): / replace = "Phe"
  VARIANT (46)..(46): / replace = "Leu" / replace = "Val"
HFSRYGRVRDVDMKRDYAFVEFSDPRDADDARYNLDGRDVDGSRIIVEFA

SEQ ID NO: 243 - protein, 21 aa, Artificial sequence
  motif 3
  VARIANT (3)..(3): / replace = "Gly" / replace = "Ser"
  VARIANT (10)..(10): / replace = "His"
  VARIANT (12)..(12): / replace = "Ala"
  VARIANT (17)..(17): / replace = "Thr"
YGNTRLYVGRLSSRTRSRDLE

SEQ ID NO: 244 - protein, 7 aa, Artificial sequence
  motif 4
RLYVGRL

SEQ ID NO: 245 - protein, 7 aa, Artificial sequence
  motif 5
RDYAFIE

SEQ ID NO: 246 - protein, 6 aa, Artificial sequence
  motif 6
RSYSRS

SEQ ID NO: 247 - DNA, 2194 bp, Oryza sativa
aatccgaaaagtttctgcaccgttttcaccccctaactaacaatatagggaacgtgtgctaaatataaaatgagaccttatatatgtagcgctgataactagaactatgcaagaaaaactcatccacctactttagtggcaatcgggctaaataaaaaagagtcgctacactagtttcgttttccttagtaattaagtgggaaaatgaaatcattattgcttagaatatacgttcacatctctgtcatgaagttaaattattcgaggtagccataattgtcatcaaactcttcttgaataaaaaaatctttctagctgaactcaatgggtaaagagagagattttttttaaaaaaatagaatgaagatattctgaacgtattggcaaagatttaaacatataattatataattttatagtttgtgcattcgtcatatcgcacatcattaaggacatgtcttactccatcccaatttttatttagtaattaaagacaattgacttatttttattatttatcttttttcgattagatgcaaggtacttacgcacacactttgtgctcatgtgcatgtgtgagtgcacctcctcaatacacgttcaactagcaacacatctctaatatcactcgcctatttaatacatttaggtagcaatatctgaattcaagcactccaccatcaccagaccacttttaataatatctaaaatacaaaaaataattttacagaatagcatgaaaagtatgaaacgaactatttaggtttttcacatacaaaaaaaaaaagaattttgctcgtgcgcgagcgccaatctcccatattgggcacacaggcaacaacagagtggctgcccacagaacaacccacaaaaaacgatgatctaacggaggacagcaagtccgcaacaaccttttaacagcaggctttgcggccaggagagaggaggagaggcaaagaaaaccaagcatcctccttctcccatctataaattcctccccccttttcccctctctatataggaggcatccaagccaagaagagggagagcaccaaggacacgcgactagcagaagccgagcgaccgccttctcgatccatatcttccggtcgagttcttggtcgatctcttccctcctccacctcctcctcacagggtatgtgcctcccttcggttgttcttggatttattgttctaggttgtgtagtacgggcgttgatgttaggaaaggggatctgtatctgtgatgattcctgttcttggatttgggatagaggggttcttgatgttgcatgttatcggttcggtttgattagtagtatggttttcaatcgtctggagagctctatggaaatgaaatggtttagggatcggaatcttgcgattttgtgagtaccttttgtttgaggtaaaatcagagcaccggtgattttgcttggtgtaataaagtacggttgtttggtcctcgattctggtagtgatgcttctcgatttgacgaagctatcctttgtttattccctattgaacaaaaataatccaactttgaagacggtcccgttgatgagattgaatgattgattcttaagcctgtccaaaatttcgcagctggcttgtttagatacagtagtccccatcacgaaattcatggaaacagttataatcctcaggaacaggggattccctgttcttccgatttgctttagtcccagaattttttttcccaaatatcttaaaaagtcactttctggttcagttcaatgaattgattgctacaaataatgcttttatagcgttatcctagctgtagttcagttaataggtaatacccctatagtttagtcaggagaagaacttatccgatttctgatctccatttttaattatatgaaatgaactgtagcataagcagtattcatttggattattttttttattagctctcaccccttcattattctgagctgaaagtctggcatgaactgtcctcaattttgttttcaaattcacatcgattatctatgcattatcctcttgtatctacctgtagaagtttctttttggttattccttgactgcttgattacagaaagaaatttatgaagctgtaatcgggatagttatactgcttgttcttatgattcatttcctttgtgcagttcttggtgtagcttgccactttcaccagcaaagttc

SEQ ID NO: 248 - DNA, 52 bp, Artificial sequence
  primer: prm15077
ggggacaagtttgtacaaaaaagcaggcttaaacaatgccgcgctatgatga

SEQ ID NO: 249 - DNA, 50 bp, Artificial sequence
  primer: prm15078
ggggaccactttgtacaagaaagctgggtactgcgattaaatttcaggct

SEQ ID NO: 250 - DNA, 288 bp, Oryza sativa
atggaatccattaagacacaatctcaaggttctgcctcttctgttccaaagaacccagccatgtcctcttgtcggaagaagaagtctgacgacgctacgttcctcgaagatctgaaagaccatatcgacgagttcatccatgcctccatggatgagcacaagcattgcttcaaaaacaccatccagaagatgtttgggatgtcaaaggttgtcgcagagcgttccgctgaagcaaaagaagctgaagtcgagagcgctttgcctcttcagaccagtgtctcgcagtag

SEQ ID NO: 251 - protein, 95 aa, Oryza sativa
MESIKTQSQGSASSVPKNPAMSSCRKKKSDDATFLEDLKDHIDEFIHASMDEHKHCFKNTIQKMFGMSKVVAERSAEAKEAEVESALPLQTSVSQ

SEQ ID NO: 252 - DNA, 480 bp, Acetabularia acetabulum
atgggggttaataaagcaggcggtatcattggcagctaccaggaaagcgcggagcttgtgagctccgagaagagacttcagccgtacaaggaagtgtttggattggagcgtttccgggagtgcgagttgatccacgggcgttgggccatgcttgcgtgtctggggtgcattgtggctgagggggccacgggcgtcagctgggtggaagctggcaaagttgagctggatggggcacaatatttcaatttcaacctacccttctccatcacacagctcgtatggattgaagctattcttgtcggcggcgctgaaatttacagaaacactgaactagatagcgtaaaaaggtgttaccccggtggaatttttgatcccttgaaattggcatctgatgacagcgagaggtctttcaaactgaaggaagcagaaatcaaacatgcacgacttgcaatgatcgcttttcttggctattccatatag

SEQ ID NO: 253 - protein, 159 aa, Acetabularia acetabulum
MGVNKAGGIIGSYQESAELVSSEKRLQPYKEVFGLERFRECELIHGRWAMLACLGCIVAEGATGVSWVEAGKVELDGAQYFNFNLPFSITQLVWIEAILVGGAEIYRNTELDSVKRCYPGGIFDPLKLASDDSERSFKLKEAEIKHARLAMIAFLGYSI

SEQ ID NO: 254 - DNA, 201 bp, Adiantum capillus-veneris
gaacgataatatgttggtgtgtatgtgatctgtatagaggtactgcaatattttcatcaccttgtgcattagcttcagtaccagcgatgcattaattgctgcgtataggcgcagctggttggggaacgataatatgttggtgtgtatgtgatctgtatagagagaaattaagaggatagaatataattggtgcagctatga

SEQ ID NO: 255 - protein, 66 aa, Adiantum capillus-veneris
MDGIDSFDLIKARSSITKKLKMATTTKGNVWYIRENPSRPSVRKKRERVFLERWVSSACGSGLKNQ

SEQ ID NO: 256 - DNA, 225 bp, Allium cepa
atgcaggaaaaaaagtcaactgatgatggaatttttggtaatatcaagagccactataagcagtttgtgaatagtcctatggatcgacacaggatttgtctgaagaaaactctggatggtgttagcaacaagttcaggaaatctggctctatgattgaattaaagactgaaggtgacatggttgttagagaagagaaccaaaagccagtccaaagttctgagtag

SEQ ID NO: 257 - protein, 74 aa, Allium cepa
MQEKKSTDDGIFGNIKSHYKQFVNSPMDRHRICLKKTLDGVSNKFRKSGSMIELKTEGDMVVREENQKPVQSSE

SEQ ID NO: 258 - DNA, 216 bp, Arachis hypogaea
gttttgtgcttaatttacctgtcttatactgatcctatttgtatattttgggcataagatgatcatatagatatgatgactttaagattggacctaactagagcttctaccatgggctgtaatgagcttgctcaggttttgcattttgtaatcttgtggtgtaaatctaatttctttttctatggcacttaaatgtgcttgtgtttatttatttgt

SEQ ID NO: 259 - protein, 71 aa, Arachis hypogaea
MRSVFGHQLHVLALNSKSRAGVYFLLKCLTELSFIHYDARFLQCLKDNFFQFLHLQSSIRLLSQINKHKHI

SEQ ID NO: 260 - DNA, 270 bp, Arabidopsis lyrata
atggagacccagaaaaatcaagccgaaatccctccgaaaccggccatgacttcatgtaggaagaaggtaaaggatgatgccactttctttgaggacgtcaaagatcacattgatgacttcatacatgcctccatggatgaacacaagacctgtttccagaagaccatcaagaagatgtttggattatcaaaggcggtcgcagagaagcaagctgaggaggcaaagggagtcgagagtcaattgcctcttcagacgacagtgtcagagtaa

SEQ ID NO: 261 - protein, 89 aa, Arabidopsis lyrata
METQKNQAEIPPKPAMTSCRKKVKDDATFFEDVKDHIDDFIHASMDEHKTCFQKTIKKMFGLSKAVAEKQAEEAKGVESQLPLQTTVSE

SEQ ID NO: 262 - DNA, 315 bp, Arabidopsis lyrata
atggcttcccagacaaagcaaaccgtggtggatacacagaaaattgaaaccgagaacccgccaaaaccggaagtgcctttatcatcatgcaggaagagggtgaaggatgataatgccactttctttgaaaacctcaaggatcacatggatgaattcatccatgcctcaatggatgaacacaagacttgtttcaaaaacaccatgaacaagatgttcgggaccttttcgaagtcggatgcagttgcagagaagcaatttgaggctaaggaagtcgtcgagattcactctcctcttcaggcagcagtgactaagtag

SEQ ID NO: 263 - protein, 104 aa, Arabidopsis lyrata
MASQTKQTVVDTQKIETENPPKPEVPLSSCRKRVKDDNATFFENLKDHMDEFIHASMDEHKTCFKNTMNKMFGTFSKSDAVAEKQFEAKEVVEIHSPLQAAVTK

SEQ ID NO: 264 - DNA, 348 bp, Arabidopsis lyrata
atggctggctttcacttataccttgtcctccggttttctctccatgcggaatcgagaatcgtatccttacaatcggcttcactcactaactcacccaaaccagaagtgccttcatcatcatgtaggaagtgggacaaggatgaaagtgccactttctttgaaaagccgaagaagcacctggatgaacacatgacttgtttcaaaaccaccatgaacaagcctaagcaaattcatgagatcaaggacttgcttccgacagcaagaaggagagatgctcgatctgtgacgatgatgagaagcaaatggaactatttaatggaattaagatttgaattgttttggatttga

SEQ ID NO: 265 - protein, 115 aa, Arabidopsis lyrata
MAGFHLYLVLRFSLHAESRIVSLQSASLTNSPKPEVPSSSCRKWDKDESATFFEKPKKHLDEHMTCFKTTMNKPKQIHEIKDLLPTARRRDARSVTMMRSKWNYLMELRFELFWI

SEQ ID NO: 266 - DNA, 387 bp, Alexandrium ostenfeldii
atggcagaggccactgggtctgggaatgagctggatgagcaaactgcctacggatatggcggacaacaaccccaggcatcgagcccgcgggtaagcttggaacgagcaacgatacggccatgccatcaacaatgggagagctcacgccggaaatggcaatcacccccgtctgcgcaaaccacacatgcgccaagcgctgcggttctcactcctgtagagtatgcaaccacgcaggcaaacaagctgtatcatgcatcgctggacgaacacctgaagccacgtgagttgcgtctgatcacggagccacgtaccaatatgccacaaccggagatcccaggacccgtaaccccttgccaacatgggggaagcgaggtacgcatgcggtga

SEQ ID NO: 267 - protein, 128 aa, Alexandrium ostenfeldii
MAEATGSGNELDEQTAYGYGGQQPQASSPRVSLERATIRPCHQQWESSRRKWQSPPSAQTTHAPSAAVLTPVEYATTQANKLYHASLDEHLKPRELRLITEPRTNMPQPEIPGPVTPCQHGGSEVRMR

SEQ ID NO: 268 - DNA, 213 bp, Avena sativa
atgatgatcaggttggtggttatgttgtcggttacaagggtctggtatttgcaacagtcagaggatctggtcatatggttcctacataccaacctcgaagagcactcatcttgttctcctctttcctgcaaggaaagctgccccctgaatgacaagaacattgcaagcttatatttcttctttgtttttagagtcagagagagagaatggtga

SEQ ID NO: 269 - protein, 70 aa, Avena sativa
MMIRLVVMLSVTRVWYLQQSEDLVIWFLHTNLEEHSSCSPLSCKESCPLNDKNIASLYFFFVFRVREREW

SEQ ID NO: 270 - DNA, 225 bp, Agrostis stolonifera
atgccctatattgatcaccgaatcgaaaaggcgcgaatacaaaggaagaaacttaataccctctatctcctaagagactgtgcgcgtaatccatggaatactaataggctaaagactttagagggcatagcacaagggagttgcattttagataccaaattagacagctcgtttttactagatctaaacaatcatattacacaactaacgagctacgtagcatag

SEQ ID NO: 271 - protein, 74 aa, Agrostis stolonifera
MPYIDHRIEKARIQRKKLNTLYLLRDCARNPWNTNRLKTLEGIAQGSCILDTKLDSSFLLDLNNHITQLTSYVA

SEQ ID NO: 272 - DNA, 264 bp, Agrostis stolonifera
ctgcaaccggaagatgccaccagaatgccaatgcctggacatctcgtaccagggttgcaacccagcgtgcacgaactgcgtcaagtacaccgccaccgacgacgaaccgcccgtctaccggtgtgccgactcgctcaccaacttctgcaagcgccgctgcacgccgaccgcggcggcgaccatgcatctgaatgaatgaacccgggcccggcgacttctctgaggataagttctgttcctgctttgctttgagaaaagaaataa

SEQ ID NO: 273 - protein, 87 aa, Agrostis stolonifera
MREKAREYHYYRNFEHVQHFIHGNSRMRSMCHQAATRLLFLFSKQSRNRTYPQRSRRARVHSFRCMVAAAVGVQRRLQKLVSESAHR

SEQ ID NO: 274 - DNA, 315 bp, Arabidopsis thaliana
atggcttcccagacaaatcaaaccgtggtggataccaagaaaatcgaaaccgagaacccgccaaaaccgcaagtgcctgcatcatcatgcaggaagagggtgaaggatgataacgccactttctttgcaaacctcaaggatcacatggatgaattcatacatgcctcaatggatgaacacaagacttgtttcaaaaacaccatggacaagatattcgggagcttctccaaggcggaggcagttgcagagaagcaaattgaggctaaggaagtggtcgagattcactctcctcttcagacagcagtgactaagtag

SEQ ID NO: 275 - protein, 104 aa, Arabidopsis thaliana
MASQTNQTVVDTKKIETENPPKPQVPASSCRKRVKDDNATFFANLKDHMDEFIHASMDEHKTCFKNTMDKIFGSFSKAEAVAEKQIEAKEVVEIHSPLQTAVTK

SEQ ID NO: 276 - DNA, 273 bp, Arabidopsis thaliana
atggagacgcagaaaactcaagctgaaaacccgccaaaaccggccacgtcttcatgtcgaaagaagacaaaggatgatgccaatttcctagaagacgtcaaggatcacatcgatgatttcattaatgcttccatggatgatcacaagaactgtttcaacaaaaccatcaagaagatgtttgggttgtcaaaggctgttgcggataagcagcaaagtgaggctaaaggaggagtcgagagttatttgcctcttcagacaacagtctcagattag

SEQ ID NO: 277 - protein, 90 aa, Arabidopsis thaliana
METQKTQAENPPKPATSSCRKKTKDDANFLEDVKDHIDDFINASMDDHKNCFNKTIKKMFGLSKAVADKQQSEAKGGVESYLPLQTTVSD

SEQ ID NO: 278 - DNA, 261 bp, Arabidopsis thaliana
atggagacccagacaaatcaaagtccgaaaccggccatgacttcatgtaggaagaaggtaaaggatgatgccactttctttgaggacgtgaaagatcacattgatgactttatacatgcctcaatggatgaacacaagtcctgtttccaaaagaccatcaaaaagatgtttggattgtcaaaggcggtcgcagagaagcaagctgtggaggcaaagggagtcgagagtcaattgcctcttcagacgacagtctcggagtaa

SEQ ID NO: 279 - protein, 86 aa, Arabidopsis thaliana
METQTNQSPKPAMTSCRKKVKDDATFFEDVKDHIDDFIHASMDEHKSCFQKTIKKMFGLSKAVAEKQAVEAKGVESQLPLQTTVSE

SEQ ID NO: 280 - DNA, 279 bp, Amborella trichopoda
atgaaaccccaaccccaaatgaatcaatctgaaaccgaacgcccctctgcaactatctcttcgtgtcggaagaagaaatcagatgacagcagctttttggaggacgtgagggaccatatcgatgaattcattcacgcttctatggatgagcacaaaacttgtttcaagaagactattcagaagatgtttggaatgtccaaggtagttgctgagaggaatttagccacccaaaaggaagtcgaaagtgttctgcccctccaatccgttgtgtcagagtag

SEQ ID NO: 281 - protein, 92 aa, Amborella trichopoda
MKPQPQMNQSETERPSATISSCRKKKSDDSSFLEDVRDHIDEFIHASMDEHKTCFKKTIQKMFGMSKVVAERNLATQKEVESVLPLQSVVSE

SEQ ID NO: 282 - DNA, 285 bp, Aquilegia sp.
aggtgggggtgtgatgggggcagatggttgggactcaggttcagtaaactgagctgccattcgtaacacctaatagaagaggaggattagctagattcttatcagagttaagaacatatataagatattatataaattttatagaagttttaccacatgaaattttaagtctgatctttattcatagttagataatgcgacctattcttttcttttctttttttccggtctgtttaaaaacacacacagcaataataattgcatgacatctgactagtccactat

SEQ ID NO: 283 - protein, 94 aa, Aquilegia sp.
MAAQFTEPESQPSAPITPPPVSSCRKKKSDDNASFLEDVKSHIDEFVSASMDEHTTCFKKTIQKMFGMSKVVAERNANAKEVESSLPLQTQVAD

SEQ ID NO: 284 - DNA, 282 bp, Brachypodium distachyon
tgctggagattattatccagcaggccacagtgccggtggttgtcgatgctggcatcggcgttcccagccatgccgcgcaggcgctggaaatgggggccgacgcggtgttagtgaatacggcgattgccgtcgcggacgatcccgtcaacatggcgaaggcatttcgtctggcggtagaagcaggcctactggcacgtcagtccggaccgggcagccgcagttattttgctcatgccaccagcccgctgaccggatttctggaggcatcggcatgaaaacctt

SEQ ID NO: 285 - protein, 93 aa, Brachypodium distachyon
MAGNADASIDNHRHCGLLDNNLQHGAGFQSLIRANRRAERHHRCTADFFQTFTQYRIGPAVRQHDKSLLYQRFGGFQGFDGIGQQPAGVRVNL

SEQ ID NO: 286 - DNA, 366 bp, Brassica napus
atgttaatggaaaaaaagcttgtggttaaggagctggagaaagggaaagagttagcgaatcagctgatgaacaatttcaaaaacccttcctcgtcttctaaggattcaaatgaggttttgatatcggagatcctcaaatgtttcgaaaacacaatagctaggatgatgagtcttgaaaagaaaactcttaagagaagccatgagagaagtaatcagagtaacaagaagagaatgctggaaaaaaaaaagacggagaacgtgaagatttgtgtcggaacaggacaagaaggaactccacttgatgatggtcactgctggagaaaatatggtcagaaagatattcatggatccaagaaccctaggtaa

SEQ ID NO: 287 - protein, 121 aa, Brassica napus
MLMEKKLVVKELEKGKELANQLMNNFKNPSSSSKDSNEVLISEILKCFENTIARMMSLEKKTLKRSHERSNQSNKKRMLEKKKTENVKICVGTGQEGTPLDDGHCWRKYGQKDIHGSKNPR

SEQ ID NO: 288 - DNA, 240 bp, Brassica napus
atggatagccagaaggagaaggagccaaaagctgcagtttctacgacatcttcttcttgcaggaagtatgtcaatgatgacaacgccactttccttgcaaacctcaaagaccacttcaacgagttcctcaatgcctctatggatgaacacaaaacttgcttcaaaaacaccatcgacaagatattcgggaggtcaaaggaggttgagactaaggaagtcgagagtcgccctcctctttag

SEQ ID NO: 289 - protein, 79 aa, Brassica napus
MDSQKEKEPKAAVSTTSSSCRKYVNDDNATFLANLKDHFNEFLNASMDEHKTCFKNTIDKIFGRSKEVETKEVESRPPL

SEQ ID NO: 290 - DNA, 294 bp, Brassica napus
atggagacaccaccaaaagatgaaacacaaaaccctcctgcgaatccgaatccgaaaccagccatggcgtcttcatgtaggaggaaggtaaaggaagatgccactttttttgaggacgtgaaagatcacatcgatgagttcattcatgcctccatggatgaacacaagacctgcttccagaagaccatcagcaagatgtttggattatccaaggctgtggctgagaagcaggccgaggaagccaagggaggagtcgagagtcagttgcctcttcaaacgacagtgtcggattaa

SEQ ID NO: 291 - protein, 97 aa, Brassica napus
METPPKDETQNPPANPNPKPAMASSCRRKVKEDATFFEDVKDHIDEFIHASMDEHKTCFQKTISKMFGLSKAVAEKQAEEAKGGVESQLPLQTTVSD

SEQ ID NO: 292 - DNA, 270 bp, Brassica napus
atggagacaccaccaaaagatgaaacacaaaaccctcctccgagaccagccatggcttcatgtaggaggaaggtaaaggaagatgccactttctttgaggacgtcaaagatcacatcgatgagttcatccatgcctccatggatgaacacaagacctgtttccagaagaccatcagcaagatgtttggattatccaaggctgtggctgagaagcaggccgagggaggagtcgagagtcagttgcctcttcaaacgacagtgtcggattaa

SEQ ID NO: 293 - protein, 89 aa, Brassica napus
METPPKDETQNPPPRPAMASCRRKVKEDATFFEDVKDHIDEFIHASMDEHKTCFQKTISKMFGLSKAVAEKQAEGGVESQLPLQTTVSD

SEQ ID NO: 294 - DNA, 273 bp, Brassica napus
atggagacgaagaatactcaagctgaaaacccgcctaagccagccatgtcttcgtgtagaaagatagtcaaggatgatgccaatttcttagaagacgtcaaggaccacattgatgaattcatcaatgcctccatggatgatcacaagaattgtttcaacaagaccatcaagaagatgtttggattatcgaaggctgttgcagagaagcagcaagctgaagaagctaaaggagtggagagttatttgcctcttcagacaactctctctgattag

SEQ ID NO: 295 - protein, 90 aa, Brassica napus
METKNTQAENPPKPAMSSCRKIVKDDANFLEDVKDHIDEFINASMDDHKNCFNKTIKKMFGLSKAVAEKQQAEEAKGVESYLPLQTTLSD

SEQ ID NO: 296 - DNA, 240 bp, Brassica napus
atggatagccagaaggataaggagccaaaaaaagctgcagtttctacgacatcatcttgcaggaagtatgccaatgatgacaacgccactttccttgcaaacctcaaagaccactttaacgagttcctcaatgcctctatggatgaacacaagacttgcttcaaaaacaccatcgacaagatattcgggaggtcaaaggaggttgagactaaggaagtcgagagtcgccctcctctttaa

SEQ ID NO: 297 - protein, 79 aa, Brassica napus
MDSQKDKEPKKAAVSTTSSCRKYANDDNATFLANLKDHFNEFLNASMDEHKTCFKNTIDKIFGRSKEVETKEVESRPPL

SEQ ID NO: 298 - DNA, 273 bp, Brassica napus
atggagacgcagaagactcaagctgaaaaccagcctaaaccagccatgtcttcgtgtagaaagatggtcaaggatgatgccaatttcttagaagacgtcaaggaccacattgatgagttcatcaatgcctccatggatgatcacaagaattgtttcaacaagaccatcaagaagatgtttggactgtcaaaggctgttgcagagaagcagcaagctgaagaagctaagggagtggagagttatttgccccttcagacaactctctctgattag

SEQ ID NO: 299 - protein, 90 aa, Brassica napus
METQKTQAENQPKPAMSSCRKMVKDDANFLEDVKDHIDEFINASMDDHKNCFNKTIKKMFGLSKAVAEKQQAEEAKGVESYLPLQTTLSD

SEQ ID NO: 300 - DNA, 483 bp, Betula pendula
atgggtgttttcaattacgaaactgaggccacctctgttatcccagcggctaggctattcaaggctttcatccttgatggagataatctctttccaaaggttgcaccgcaagccattagcagtgttgaaaacattgaaggaaatggagggcctggaaccatcaagaagatcagctttcccgaaggcatccctttcaagtacgtgaaggacagggttgatgaggtggaccacgcaaacttcaaatatagctacagcctaatcgagggagggcccgtgggcgatacattggagaagataagcaacgagataaagatagtggcaacccctgatggaggatccatcttgaagattagcaacaagtaccacaccaaaggcaaccatgaggtgaaggcagagcagattaaggcaagtaaagaaatgggcgagacacttttgagggccgttgagagctacctcttggcacactccgatgcctacaactaa

SEQ ID NO: 301 - protein, 160 aa, Betula pendula
MGVFNYETEATSVIPAARLFKAFILDGDNLFPKVAPQAISSVENIEGNGGPGTIKKISFPEGIPFKYVKDRVDEVDHANFKYSYSLIEGGPVGDTLEKISNEIKIVATPDGGSILKISNKYHTKGNHEVKAEQIKASKEMGETLLRAVESYLLAHSDAYN

SEQ ID NO: 302 - DNA, 483 bp, Betula pendula
atgggtgttttcaactacgaggatgaggccacctccgttattgctccggctaggctcttcaagtcctttgtccttgacgccgacaacctcattcccaaggttgcacctgagaacgttagcagtgccgaaaatattgaaggaaacggaggacctggaaccatcaagaagatcacctttcccgaaggaagccatttcaagtacatgaagcacagggttgatgagatcgaccacgcaaacttcaaatactgctacagcataatcgagggcggtccattgggcgacacactggagaagatctcttacgagatcaagattgtggccgcccctggtggaggatccatcttgaagatcaccagcaagtaccacaccaaaggcgacatttcgctcaatgaggaggagattaaggccggcaaagaaaagggcgccggacttttcaaggctgttgagaactacctcgtggcacacccaaatgcctacaactaa

SEQ ID NO: 303 - protein, 160 aa, Betula pendula
MGVFNYEDEATSVIAPARLFKSFVLDADNLIPKVAPENVSSAENIEGNGGPGTIKKITFPEGSHFKYMKHRVDEIDHANFKYCYSIIEGGPLGDTLEKISYEIKIVAAPGGGSILKITSKYHTKGDISLNEEEIKAGKEKGAGLFKAVENYLVAHPNAYN

SEQ ID NO: 304 - DNA, 258 bp, Brassica rapa
atggaagaacaaaagacacagatgacgttgtggtctatagcaaagtcccctctcatgtttggaggtgatgtgagaaagcttgatgacgctacttataatctcatcactaatcctacgcttctggaaatcaattcttatagctctaacaacatggagtttccttacatcacaccggcaagagtatctggggaaaagcacaacatccatcctcatgttctaacgggaaacaacgtttcaacgcacatgcatttgtcctga

SEQ ID NO: 305 - protein, 85 aa, Brassica rapa
MEEQKTQMTLWSIAKSPLMFGGDVRKLDDATYNLITNPTLLEINSYSSNNMEFPYITPARVSGEKHNIHPHVLTGNNVSTHMHLS

SEQ ID NO: 306 - DNA, 282 bp, Capsicum annuum
atggcagcagaaaatgtccaaaatgataagtcaccatcccctgttactccaaatccagctgctacttcatgtaggaagaagaagagcgaacaagcgtcttttctagaagatatcaaggatcacatggatgaattcattcatgcttccatggatgaacacaaaacctgcttcaagaagaccgtccaaaagatgtttggcatgtcaaaagttgttgcagaaaggaatgctgaggctaaagaggttgagagttcactgccactgcaaacaacactagctaaatag

SEQ ID NO: 307 - protein, 93 aa, Capsicum annuum
MAAENVQNDKSPSPVTPNPAATSCRKKKSEQASFLEDIKDHMDEFIHASMDEHKTCFKKTVQKMFGMSKVVAERNAEAKEVESSLPLQTTLAK

SEQ ID NO: 308 - DNA, 267 bp, Capsicum annuum
atgtcaaccgagaaggccccgcttgagcaaacatcacctgttgttgcatcatcatgccgaaaaaagaagtctgaaagtgccacatttttggaggatgtaaaggatcatattgatgagtttatacacgcttcgatggatgaacacaaatcttgctttaagaagaccatccagaagatgtttgggatgtctaaagttgttgctgaaagaaatgctgaaccaaaggaggttgagagctcacttcctctccgaactgttgtatctgagtaa

SEQ ID NO: 309 - protein, 88 aa, Capsicum annuum
MSTEKAPLEQTSPVVASSCRKKKSESATFLEDVKDHIDEFIHASMDEHKSCFKKTIQKMFGMSKVVAERNAEPKEVESSLPLRTVVSE

SEQ ID NO: 310 - DNA, 213 bp, Capsicum annuum
atgattgagcacatacacaaagttgttcatgttaaggaagaaaaacatgaactgtattatgattatttcttgaatagggtgttcagtcattttaaggtagtgtgcgaaagaggcacacctgggattgtaaagcgaatgttcactttgaacaccttgatagagaatgagagtgtttggggaaaagtgggaccaagtcccaagtttcagagttga

SEQ ID NO: 311 - protein, 70 aa, Capsicum annuum
MIEHIHKVVHVKEEKHELYYDYFLNRVFSHFKVVCERGTPGIVKRMFTLNTLIENESVWGKVGPSPKFQS

SEQ ID NO: 312 - DNA, 282 bp, Coffea canephora
atggcatctgaaaaaagccagcctgaagagcagcttgtatctacagctgttgactcacatacatcttcatgtagaaagcacagggctgaaaatgccaccttctttgaagacgtgaaggatcacattcatgacttcatccatgcttcactcgatgaccacaaagcatgttttaagaaaggcatccagaagatgtttgggatgtcaaaagttggagcagaaaggagttcagaagtggaggaggttgaaagttttctccatctaagcacttcagtgtgtaaatga

SEQ ID NO: 313 - protein, 93 aa, Coffea canephora
MASEKSQPEEQLVSTAVDSHTSSCRKHRAENATFFEDVKDHIHDFIHASLDDHKACFKKGIQKMFGMSKVGAERSSEVEEVESFLHLSTSVCK

SEQ ID NO: 314 - DNA, 273 bp, Coffea canephora
gagtcgcgtgcagcatctattcttgctggtctcagtttttcttcagaagtgcaaaagagagctacgaaaactttttctggaggatggaggatgagaatagctcttgcacgtgcattatttattgagcctgacatgttgctacttgatgaacccactaatcttcttgaccttcatgctgtcctgtggctggaatcgtacttggagatatggccgaagacatttattgttgtttctcatgctagagagttcttgaatacttgttgtcacatatat

SEQ ID NO: 315 - protein, 90 aa, Coffea canephora
MSGSINNARARAILILHPPEKVFVALFCTSEEKLRPARIDAARDSAASASINSRRLYISSSLCAMASLSTPASNFSSVLPSSPSMSTCLM

SEQ ID NO: 316 - DNA, 270 bp, Crypthecodinium cohnii
tctcctctgccctttaagaggatggcttcctggagcagacatgttctcaagttctcaatcatgtgggatgggtggtccagccttaaggcttctatgaaggtcgcagacgccaacatttgaatccgacactgggacttgtccaacgttgtggggaccttggacagccaaaaccgattcgatgacatgttgccaggcatccagtccaatcgttaagacgaatgccatgaaaaatgtacgaaggcacagagtgtgccatgcagcctcgaatcg

SEQ ID NO: 317 - protein, 89 aa, Crypthecodinium cohnii
MPGNMSSNRFWLSKVPTTLDKSQCRIQMLASATFIEALRLDHPSHMIENLRTCLLQEAILLKGRGEGEDAKAEEEAEAGGKPACVHQDV

SEQ ID NO: 318 - DNA, 270 bp, Cichorium intybus
atgacaacagagaagagccagcttccttctgttacacctccagccatggagtcctgtagaaagaagaagtcagatgacgccaccttccttcaggatgttaaagatcacatcgatgagtttataaatgcatccatggatgaacacaaaacctgcttcaaaaagacgatctcaaagatgtttggaatgtcaaaagttgtggcagaaagaaatgctgctgagaacaagggaattgaaagctcactgccccttcgaactgttgtttctgattag

SEQ ID NO: 319 - protein, 89 aa, Cichorium intybus
MTTEKSQLPSVTPPAMESCRKKKSDDATFLQDVKDHIDEFINASMDEHKTCFKKTISKMFGMSKVVAERNAAENKGIESSLPLRTVVSD

SEQ ID NO: 320 - DNA, 309 bp, Cryptomeria japonica
atggctcttcctcctccacccccaccttataggggtaaattatggtgtgtggttgatcttaaagcaaatatgtcggctttgccagatgccattacatatgcttgttctcagggtaacaacacctgcattgatatccaaccaggaaagccttgttatcagcctagttcggttgttagacatgcatcctatgctttcaatagctattggcagcaattcaagaactcaggggccagctgttatttcaatggagctgcaacaatggtcacaaagaaccctagttatggttcttgcagatacccatataactaa

SEQ ID NO: 321 - protein, 102 aa, Cryptomeria japonica
MALPPPPPPYRGKLWCVVDLKANMSALPDAITYACSQGNNTCIDIQPGKPCYQPSSVVRHASYAFNSYWQQFKNSGASCYFNGAATMVTKNPSYGSCRYPYN

SEQ ID NO: 322 - DNA, 453 bp, Caluromys lanatus
atgagaactctcaaggactacaacattcagatctcgtatggacgctttaataagaagcagaaaagaaactgtgagattgatttgttcatcatgcaagctgatggaaagaaaattcttgaccaaagtaaacagaacgcattgtcaaatcgcttacagatggaactgactcgtcccctgagagtagctgttttgagcagaggtcccgacacagagctctttgtagcaaacccaactgagttatctggcaagggtcgacctcttgtgttttatgacatcactcttgctctaaaattgctcgacatcggtatctttttggctgaaatcagacgccatttgatcggagaccgagaatgggaagtgtacagagtcatgcttgatgaaggagctgggtcttcggttccgagaaacaagatcgaggaaggagttcggaagatgttaatgggatgggcgtaa

SEQ ID NO: 323 - protein, 150 aa, Caluromys lanatus
MRTLKDYNIQISYGRFNKKQKRNCEIDLFIMQADGKKILDQSKQNALSNRLQMELTRPLRVAVLSRGPDTELFVANPTELSGKGRPLVFYDITLALKLLDIGIFLAEIRRHLIGDREWEVYRVMLDEGAGSSVPRNKIEEGVRKMLMGWA

SEQ ID NO: 324 - DNA, 255 bp, Centaurea maculosa
atgtcaaccgaaaaaaaccaggctccagccgtggaatcatgtcgaaagaagaagtcagatgatgcaactttcctgcaggatgtaaaagatcacatcgatgagttcatacatgcttctatggatgaacacaagacctgtttcaaaaagagcatctcaaagatgtttggaatgtctaagatcgtggcagagaggaatgctgctgaaaacaagggagtcgagagctcgcttccccttcgaacggttgtttctgattag

SEQ ID NO: 325 - protein, 84 aa, Centaurea maculosa
MSTEKNQAPAVESCRKKKSDDATFLQDVKDHIDEFIHASMDEHKTCFKKSISKMFGMSKIVAERNAAENKGVESSLPLRTVVSD

SEQ ID NO: 326 - DNA, 312 bp, Cucumis melo
cttagggcttgggtacctcaggatgatgcattttttaaacacgaacaatatcggcctgaagatatgactttcatgcaagaggaagaagtatttccacaacttgaagcagatgctccatgcacctccatcaaggaagaaggtgattctgttccttccacctccgttgaggcagatcatgtcacaaaagaaactaacggaaaaagtgaggagattgaaaccaaaaagaatgtgaagagaaaattgtctggcaatcaagttgaaaaaaaggaagcaaataaaggtcctgatggttggtttgaactaaaaataaat

SEQ ID NO: 327 - protein, 103 aa, Cucumis melo
MICLNGGGRNRITFFLDGGAWSICFKLWKYFFLLHESHIFRPILFVFKKCIILRYPSPKNPVPLVCRKEVSVFQILLIFLLHSIFFFVQLSILCCRLLKGRFY

SEQ ID NO: 328 - DNA, 588 bp, Chamaecyparis obtusa
atgaaagaagaaaatttaagaagaaagagagaaattgaagctgaattggaggctgagaaggaagctctccaggccagtgtaaatgaagaaatggtgtttctgaggcaagaggaacaagatctacagtctgcacagaagaaacatgagcgcaatgctgagtctgtgactggtgaaatgtttgtagagtgccaggaactacttcaaatgtttggtttgccgtacatcattgcaccaatggaagcagaagcccaatgtgcatatcttgaatgcacacatttagttgatggtgttgtaactgatgattgtgatgtattcctatttggtgctggtagtgtatacaagaatatctttgatgagcggaagtatgttgagacttactttatgaaggacattgaggaggagcttggtttgaatagggaaaagctaatccgcatggctttgcttcttggaagtgattatacagaggggatcagactcaacttcgtttggaggcattctacagcttcaatgaaaggtttgctaaaattcgcagtcgaagaattcagaaggctgtcactggaatcacagggcgtcgctcagcagatttga

SEQ ID NO: 329 - protein, 195 aa, Chamaecyparis obtusa
MKEENLRRKREIEAELEAEKEALQASVNEEMVFLRQEEQDLQSAQKKHERNAESVTGEMFVECQELLQMFGLPYIIAPMEAEAQCAYLECTHLVDGVVTDDCDVFLFGAGSVYKNIFDERKYVETYFMKDIEEELGLNREKLIRMALLLGSDYTEGIRLNFVWRHSTASMKGLLKFAVEEFRRLSLESQGVAQQI

SEQ ID NO: 330 - DNA, 309 bp, Carica papaya
atggtttcatatacgggaaatgttagaatggaatcacaaagaagtcaacctgaaaagcagtcgtctactgctaccccaatgcctgctgttacttcatgccgaaagaagaagactgacgatgccactttctttgaggatttgaaggaccacattgatgagttcgtccatgcatcaatggatgaacacaaaacctgcttcaagaagaccctccaaaagatgtttggaatgtcaaaagttgttgcaggaaggagtgctgagactaacggagttgaaagttctcttccccttcaaacaacagtttcagattag

SEQ ID NO: 331 - protein, 102 aa, Carica papaya
MVSYTGNVRMESQRSQPEKQSSTATPMPAVTSCRKKKTDDATFFEDLKDHIDEFVHASMDEHKTCFKKTLQKMFGMSKVVAGRSAETNGVESSLPLQTTVSD

SEQ ID NO: 332 - DNA, 270 bp, Cyclamen persicum
atgtacttgtcagatgtagaagaaggcggtgagactgtttttccggaagctaagggaaacattagttcagtgccgtggtggaacgacctatctgaatgtggtaaaaagggtctctctgttaagcctaggatgggtgatgctttgcttttttggagtatgcatcctgatggcacattagactcatccagtcttcatggtggttgcccagtgattaaaggaaacaaatggtcctctaccaagtggttgcatgtcgagaaatacaaggtctaa

SEQ ID NO: 333 - protein, 89 aa, Cyclamen persicum
MYLSDVEEGGETVFPEAKGNISSVPWWNDLSECGKKGLSVKPRMGDALLFWSMHPDGTLDSSSLHGGCPVIKGNKWSSTKWLHVEKYKV

SEQ ID NO: 334 - DNA, 270 bp, Cyclamen persicum
atgtacctctcggatgtagaagaaggtggtgagacagtttttcctactgctaaaggaaatattagctcagtcccttggtggagcgagctttctgaatgtgggaaagaggggctctctgttaagccaaagatgggagatgccttgcttttctggagcatgaaacctgacgccactctggattcttcaagtttgcacggtggctgccccgttattaaagggaacaagtggtcctcaacaaaatggatgcgtgtgaatgagtataaggtgtaa

SEQ ID NO: 335 - protein, 89 aa, Cyclamen persicum
MYLSDVEEGGETVFPTAKGNISSVPWWSELSECGKEGLSVKPKMGDALLFWSMKPDATLDSSSLHGGCPVIKGNKWSSTKWMRVNEYKV

SEQ ID NO: 336 - DNA, 627 bp, Ceratopteris richardii
atgcaggagggccgagagtctgcgtatggtggagcgagcgaacgagcttcgtcagctagcatccatttctcactgactcccggtgtatatcgttgcgttgcgtttcgttcctcactgtggaccatacctgcatccatggactctcatcgccatttcgtgaagagctgtaggcgtattatcatcaaggttggtacaaatgtggtgacacgtgcagaagatgggaagtttgctttaggccgtatcggtgcgctatgtgaacaggtgaaggagttagttgaatcaggtattgaagtcatcatagttacatctggagctgtaggtatgggatattgtcttcttcgtcagtacaggaccctaaatacaagctttgcagatttggcaaagtcagaggctcaaccagatggaaaggcatgtgctgccgtgggtcaaagtggcttgattatgctctacgacacgctctttagcctgttagatgtagcatcatctcagcttcttgttaccagccgggacttttgcaacaaggatttcaggaaacaactcgttgatactgtcaactcccttgttgatatgcaagtggttcctatatttaatgagaatgatgcgatcagcacgcggggagacatttag

SEQ ID NO: 337 - protein, 208 aa, Ceratopteris richardii
MQEGRESAYGGASERASSASIHFSLTPGVYRCVAFRSSLWTIPASMDSHRHFVKSCRRIIIKVGTNVVTRAEDGKFALGRIGALCEQVKELVESGIEVIIVTSGAVGMGYCLLRQYRTLNTSFADLAKSEAQPDGKACAAVGQSGLIMLYDTLFSLLDVASSQLLVTSRDFCNKDFRKQLVDTVNSLVDMQVVPIFNENDAISTRGDI

SEQ ID NO: 338 - DNA, 375 bp, Cycas rumphii
atgacagagttgtggctcgataaattctataagaagacaaccaacttaccagagcctttcccacatgaacttgttgagcgtctagaaaaatatcttgataatctggaagagcagttggttgatctatcctcactgttgtttgaccaccgtctggaggatgcccatcgtaactcctccgaaatattccaaaatacaatatttacgcagcaatacgtacagcgtgtattaatatccgagaaggacaaaatgagatgttgttcagtggaatacgaagctcctgttcaaacctctcaaacatttgtttatggcggaattttagttgccggttttattgtttactttcttgttatattcttctcgtcaccagaacgctga

SEQ ID NO: 339 - protein, 124 aa, Cycas rumphii
MTELWLDKFYKKTTNLPEPFPHELVERLEKYLDNLEEQLVDLSSLLFDHRLEDAHRNSSEIFQNTIFTQQYVQRVLISEKDKMRCCSVEYEAPVQTSQTFVYGGILVAGFIVYFLVIFFSSPER

SEQ ID NO: 340 - DNA, 291 bp, Cycas rumphii
atggataaggaggtatcccatacatatccaactacagaaaagaaatcatcaccatccacaccctcagaaatgacatcatgcaggaagaagaaatctgcagacagctcatttgtggctgacttgatggatcacattgatgagtttgtccatgcctctatggatgagcacaaaacttgcttccaaaagaccattcgaaagatgtttggactgtcaaaaaaggttgcagaggaaaatgcaagccctgtgccagtggagagtgtcctccctcttcaaacaacaacatcaggatag

SEQ ID NO: 341 - protein, 96 aa, Cycas rumphii
MDKEVSHTYPTTEKKSSPSTPSEMTSCRKKKSADSSFVADLMDHIDEFVHASMDEHKTCFQKTIRKMFGLSKKVAEENASPVPVESVLPLQTTTSG

SEQ ID NO: 342 - DNA, 204 bp, Cycas rumphii
taacgggtgaattgccgtttttcggggcaaacatacaatctcaacggggcctaaccaggatttggatctttctttgtgctcctgattggagatgggtttttgattgtgccaagcgtgcaggaaatagtgtataggttttctttggcagaaggtatagtattgttgttggtgagaattgaactttgttggaagagatgggagggg

SEQ ID NO: 343 - protein, 67 aa, Cycas rumphii
MRHKHCYVPRVESLHGCLDVIQIPSNQPNSHKICSRPPRYLKLQANWTFVALKRMIMMMMCCQGSHK

SEQ ID NO: 344 - DNA, 270 bp, Cucumis sativus
  misc_feature (246)..(246): n is a, c, g, or t
caaatgcagggaacatgctgaggcaaagcacccgaaatctgatgtccacacttgtttcccacatcttaaaaaatgaaagaataaacaagaaagaatactgtcaaggcacgctctgatagcaacctcctcgcctcattgtttagatgtgaatctttgccatttcgactctgtagcaggatgcacgatttcttgtcttgaactgtgtttgcacgctatttggtgtgtttatttatggtaatgctcccncatgtatcagaaaattggctttga

SEQ ID NO: 345 - protein, 89 aa, Cucumis sativus
MWETSVDIRFRVLCLSMFPAFDLRRRADKGLHAYLALNRHCFLVCFKLTSLRSSFQLLHVLLAGHLRFLAVPSTHFHEEPRENLTSLKP

SEQ ID NO: 346 - DNA, 282 bp, Citrus sinensis
atggaaacgcaaaagattcagcaggagaaacaatcatcacctgttgctccaactcctgccatgacttcatgtcgaaagaagaagaaagatgatgccactttcttggaggatttgaaagatcacatcgatgagtttgtaaatgcatcaatggaggaacacaaaacttgtttttcaaagaccatcaaaaagatgtttggtatgtcaaaagttgtagcagaaaggaatgctaacacccaggaagttgaaagctccctgccccttcagacaacaatttcagattaa

SEQ ID NO: 347 - protein, 93 aa, Citrus sinensis
METQKIQQEKQSSPVAPTPAMTSCRKKKKDDATFLEDLKDHIDEFVNASMEEHKTCFSKTIKKMFGMSKVVAERNANTQEVESSLPLQTTISD

SEQ ID NO: 348 - DNA, 672 bp, Citrus sinensis
atggattctccaatcaaggtgactagatcaactagtgtaaaaaatggcgacatagaggtgcaaagttgggcttcatcatcttctaaatccagcaagaataaaattttcccatttagtactgccttatcaagctctgttccacgtaatgattctattactagctccttgaaatcaaagtttgataatggcgttttcttgacgtggaaggatctttcggttgtggttccaagtggtaaaaaagaaaatcgtaaacatgcaattttgcaagagctgacaggatatgttgaaccaggccagatattagccatcatgggtccttctggttgtggcaagtctactcttcttgatgcactagcaggaaggttaagttcaaacactgagcagactggggagattcttatcaatggtcgcaaagagacgcttgcttttggaacttcggcctacgtgactcaagaagacactctaatgacaacattaacagtaatggaagctatatactattctgcacagttgcagctaccagattccatgtcaagatctcagaagagagaaagagctgaaatgactattagagaaatgggattacaggacgccatggacaccagaataagaggatggaacgtaagaaggattaacggtggacaaaaaagaaaggttagcattttgcattga

SEQ ID NO: 349 - protein, 223 aa, Citrus sinensis
MDSPIKVTRSTSVKNGDIEVQSWASSSSKSSKNKIFPFSTALSSSVPRNDSITSSLKSKFDNGVFLTWKDLSVVVPSGKKENRKHAILQELTGYVEPGQILAIMGPSGCGKSTLLDALAGRLSSNTEQTGEILINGRKETLAFGTSAYVTQEDTLMTTLTVMEAIYYSAQLQLPDSMSRSQKRERAEMTIREMGLQDAMDTRIRGWNVRRINGGQKRKVSILH

SEQ ID NO: 350 - DNA, 564 bp, Citrus sinensis
atggattctccaatcaaggtgactagatcaactagtgtaaaaaatggcgacatagaggtgcaaagttgggcttcatcatcttctaaatccagcaagaataaaattttcccatttagtactgccttatcaagctctgttccacgtaatgattctattactagctccttgaaatcaaagtttgataatggcgttttcttgacgtggaaggatctttcggttgtggttccaagtggtaaaaaagaaaatcgtaaacatgcaattttgcaagagctgacaggatatgttgaaccaggccagatattagccatcatgggtccttctggttgtggcaagtctactcttcttgatgcactagcaggaaggttaagttcaaacactgagcagacctggggagattcttatcaatggtcgcaaagagacgcttgcttttggaacttcggcctacgtgactcaagaagacactctaatgacaacattaacagtaaatggaagctatatacttattctgcacagttgcagctaccagattccatgtcaagatctccaaaagaagaaaagaactga

SEQ ID NO: 351 - protein, 187 aa, Citrus sinensis
MDSPIKVTRSTSVKNGDIEVQSWASSSSKSSKNKIFPFSTALSSSVPRNDSITSSLKSKFDNGVFLTWKDLSVVVPSGKKENRKHAILQELTGYVEPGQILAIMGPSGCGKSTLLDALAGRLSSNTEQTWGDSYQWSQRDACFWNFGLRDSRRHSNDNINSKWKLYTYSAQLQLPDSMSRSPKEEKN

SEQ ID NO: 352 - DNA, 636 bp, Citrus sinensis
atggattctccaatcaatgtgactagatcaactagtgcaaaaaatggcgacatagaggtgcaaagttgggcttcatcatcttctagatccagcaagaacaaaattttcccatttagcactgctttatcaagctctgttccacgtaatgattctgttactagctccttgaaatcaaagtttgataatggcgttttcttgacgtggaaggatctttcggttgtggttccaagtggtaaaaaagaaaatcgtaaacatgcaattttgcaagagctgacaggatatgttgaaccaggccagatattagccatcatgggtccttctggttgtggcaagtctactcttcttgatgcactagcaggaaggttaagttcaaacactgagcagactggggagattcttatcaatggtcgcaaagagacgcttgcttttggaacttcggcctacgtgactcaagaagacactctaatgacaacattaacagtaatggaagctgtatactattctgcacagctgcagctaccagattctatggcaagatctgagaagagaaacagacctgaaatggctattaaagaaatggggaaacagggacgcctggaacccaaaatagggaggatggaatgtacgaggggatag

SEQ ID NO: 353 - protein, 211 aa, Citrus sinensis
MDSPINVTRSTSAKNGDIEVQSWASSSSRSSKNKIFPFSTALSSSVPRNDSVTSSLKSKFDNGVFLTWKDLSVVVPSGKKENRKHAILQELTGYVEPGQILAIMGPSGCGKSTLLDALAGRLSSNTEQTGEILINGRKETLAFGTSAYVTQEDTLMTTLTVMEAVYYSAQLQLPDSMARSEKRNRPEMAIKEMGKQGRLEPKIGRMECTRG

SEQ ID NO: 354 - DNA, 228 bp, Centaurea solstitialis
atggtttatagaaacatacaagaaaagaagcaacatgaaaccagccttgttagagcttgctgtattggatttcaacattgttcaaggaatacatcaagaagatctgaagtattcatcaaggtggtgggacggtctacgatgggacaagaagctgagctttgctcgagacagattggtggagagttttatgtggtcggtgggttcacattacgaaccaccatttggtga

SEQ ID NO: 355 - protein, 75 aa, Centaurea solstitialis
MVYRNIQEKKQHETSLVRACCIGFQHCSRNTSRRSEVFIKVVGRSTMGQEAELCSRQIGGEFYVVGGFTLRTTIW

SEQ ID NO: 356 - DNA, 270 bp, Centaurea solstitialis
atgacaaccgaagaaagtgcaccacccattgcttctgctccagaaatgacatcatgtcgtaggaaaaaatcagaggatgcaactttcttgcaggatgtgaaagatcacatcgatgaatttataaacgcgtcgacggatgaacataagacgtgtttccaaaagactatcttaaagatgtttggaatgtctaaagtggttgcgaaaagaaatgccgatgataagaaggaagttgagagttcattgcccctacgaacggtcatttctgagtag

SEQ ID NO: 357 - protein, 89 aa, Centaurea solstitialis
MTTEESAPPIASAPEMTSCRRKKSEDATFLQDVKDHIDEFINASTDEHKTCFQKTILKMFGMSKVVAKRNADDKKEVESSLPLRTVISE

SEQ ID NO: 358 - DNA, 288 bp, Centaurea solstitialis
atggcaaccgaaaaaagccaggctccagccatggaatcatgtcgaaagaagaaatcagatgatgcaactttcctgcaggatgtgaaagatcacatcgatgagtttatacatgcttctatggatgaacacaagacctgtttcaaaaagagcatctcaaagatgtttggaatgtccaagatcgtggcagagaggaatgctgctgaaaacaagggagtcgagagctcgcttccccttcgtacagttgtttctgattacatagaaaagatgatggtttacgctataatataa

SEQ ID NO: 359 - protein, 95 aa, Centaurea solstitialis
MATEKSQAPAMESCRKKKSDDATFLQDVKDHIDEFIHASMDEHKTCFKKSISKMFGMSKIVAERNAAENKGVESSLPLRTVVSDYIEKMMVYAII

SEQ ID NO: 360 - DNA, 273 bp, Cyamopsis tetragonoloba
  misc_feature (195)..(195): n is a, c, g, or t
  misc_feature (211)..(211): n is a, c, g, or t
atggaaactcagaaaacacaacctgataaaccttcttcaccaccggtggttacttcatgtcgaaagaagaagaatgaagaagccacttttttggaggatttgaaggaccacattgacgaattcattcatgcttctatggatgaacacaaaacttgcttcaagaaaactgtccagaagatgttcggtttgtccaangttgttgctgaaaggnatgccaatgctgggaaagaagttgaaagttctctgcatcttcagacaactttagcagactag

SEQ ID NO: 361 - protein, 90 aa, Cyamopsis tetragonoloba
  misc_feature (65)..(65): Xaa can be any naturally occurring amino acid
  misc_feature (71)..(71): Xaa can be any naturally occurring amino acid
METQKTQPDKPSSPPVVTSCRKKKNEEATFLEDLKDHIDEFIHASMDEHKTCFKKTVQKMFGLSXVVAERXANAGKEVESSLHLQTTLAD

SEQ ID NO: 362 - DNA, 492 bp, Carthamus tinctorius
atgtggggggcatacctgactcattcagcggttgtgggcttgtggctatgggagcgtcccaagcttcgaacccaagaccattcgattttggacaaacactacccccgcccgttaccaactgagctacgtgtcgccattggcgatccattacccattttgttaattttaatttcatctgaaaatttcgaaggtgaccgctttttattgggcatcaaaccaacgatgacaaccgaagaaagtgcaccacccattgcttctgctccagaaatgacatcatgtcgtaggaaaaagtcagaggatgcaactttcttgcaggatgtgaaagatcacatcgatgaatttataaacgcatcgacggatgaacataagacatgtttccaaaagaccatcttaaagatgtttggaatgtctaaagttgttgcagtaagaaatgccgatgataagaaggaagttgaaagttcattgtccctacgaacggtcatttctgagtag

SEQ ID NO: 363 - protein, 163 aa, Carthamus tinctorius
MWGAYLTHSAVVGLWLWERPKLRTQDHSILDKHYPRPLPTELRVAIGDPLPILLILISSENFEGDRFLLGIKPTMTTEESAPPIASAPEMTSCRRKKSEDATFLQDVKDHIDEFINASTDEHKTCFQKTILKMFGMSKVVAVRNADDKKEVESSLSLRTVISE

SEQ ID NO: 364 - DNA, 273 bp, Carthamus tinctorius
atggcaaccgaaaaaagccaggctccagccatggaatcatgtcgaaagaagaagtcagatgatgcaactttcctgcaggatgtgagagatcacatcgatgagttcatacatgcttctatggatgaacacaagacctgtttcaaaaagagcatctcaaagatgtttggaatgtctaagatcgtggcagagagaaatgctgctgctactgctactgctgctgaaaacaagggaatcgagagctcgcttccccttcgtacagctgtttctgattag

SEQ ID NO: 365 - protein, 90 aa, Carthamus tinctorius
MATEKSQAPAMESCRKKKSDDATFLQDVRDHIDEFIHASMDEHKTCFKKSISKMFGMSKIVAERNAAATATAAENKGIESSLPLRTAVSD

SEQ ID NO: 366 - DNA, 579 bp, Carthamus tinctorius
atggctagtagagcagattcagacgtcgatgatgattttagcgaactctacaaggaatacactggtcctccaagatctaataccactggtgtgcctgaaaccgcaaaaacaagcaaaaggtcccatgctggttcagatgaagaagaggaacctctagatcctaatgctgtccctacagattttactagccgtgaagctaaggtttgggaggcaaaatctaaagctactgaaaggaactggaagagaagaagaagaaggaaatttcaagcaagcttgtgtcgcaagataaaattcttggataccaagatggcaaccgaaaaaagccaggctccagccatggaatcatgtcgaaagaagaagtcagatgatgcaactttcctgcaggatgtgagagatcacatcgatgagttcatacatgcttctatggatgaacacaagacctgtttcaaaaagagcatctcaaagatgtttggaatgtctaagatcgtggcagagagaaatgctgctgctactgctactgctgctgaaaacaagggaatcgagagctcgcttccccttcgtacagctgtttctgattag

SEQ ID NO: 367 - protein, 192 aa, Carthamus tinctorius
MASRADSDVDDDFSELYKEYTGPPRSNTTGVPETAKTSKRSHAGSDEEEEPLDPNAVPTDFTSREAKVWEAKSKATERNWKRRRRRKFQASLCRKIKFLDTKMATEKSQAPAMESCRKKKSDDATFLQDVRDHIDEFIHASMDEHKTCFKKSISKMFGMSKIVAERNAAATATAAENKGIESSLPLRTAVSD

SEQ ID NO: 368 - DNA, 345 bp, Descurainia sophia
  misc_feature (272)..(272): n is a, c, g, or t
ggggtcttscggtgggggggctggggggttcttctccccgggggggcgggggggggggtsggggtctgcgggggcggggccgtkgggtctgttccgggggggggtggggtggtcgcggggggtgtcgtgctgggtcgggtttctggttcctcgtcgtgtgggttggkggggggggcgttctgggggtggggggtkgtcgcgktttggggttgggcccgcggggtccgcgggggggtgggtccttktccggggggtcgttgtttgtgggcggnctgggggtctccggcgggttcgcgggtccgggcggggggktgggcggggcggggtttcttggggggctgggtt

SEQ ID NO: 369 - protein, 114 aa, Descurainia sophia
  misc_feature (64)..(64): Xaa can be any naturally occurring amino acid
MVAVARTRKTQTAFSFSFVAHLSLRHIYNPEEESLFYYPITSLSLDPLYLLPISSTETAIFESXTVTSQSSLSLFSLVLISSSFCYSHSHQDPLKICFHLISQIRFGLSSPIFC

SEQ ID NO: 370 - DNA, 258 bp, Euphorbia esula
atggatgctcaaagcagtgaacaaaagaaacaggccccttcgtgccggaagaagaagaatgaggaagctacttttcttgaggatgtgaaagatcatatagatgaatttattcatgcttctatggatgaacacaagagttgctttaaaaatactatacaaaagatgtttggaatgtcaaagattgttgcagagaggaatgctgctgaagccaaagaagttgaaagttctttgcctcttcgcaccgttgtatcagactag

SEQ ID NO: 371 - protein, 85 aa, Euphorbia esula
MDAQSSEQKKQAPSCRKKKNEEATFLEDVKDHIDEFIHASMDEHKSCFKNTIQKMFGMSKIVAERNAAEAKEVESSLPLRTVVSD

SEQ ID NO: 372 - DNA, 375 bp, Euphorbia esula
atggagagttcatatgataatgaagaggagtatgcaagaaaagatgtgaatgatgtttctcttggagaactaagagatagggttgatgaatttgctaaagctagaggatgggagcactaccatagtcctagaaatctccttttagcagttgtaggagaagtgggagagctatcagaaatattccaatggaaaggagaggtagaaaaagggttaccaaaatggagtttggaagaaaaagagcatcttgaggaagagctttcagatgttttgctctatcttattcgtctttctgatgtctgtggaatagatcttggccaggctgctttgtctaagcttctcaaaaatgctatcaaatatcctgtttctaaatattaa

SEQ ID NO: 373 - protein, 124 aa, Euphorbia esula
MESSYDNEEEYARKDVNDVSLGELRDRVDEFAKARGWEHYHSPRNLLLAVVGEVGELSEIFQWKGEVEKGLPKWSLEEKEHLEEELSDVLLYLIRLSDVCGIDLGQAALSKLLKNAIKYPVSKY

SEQ ID NO: 374 - DNA, 333 bp, Euglena gracilis
ggtgtatgtctccctatccgcaacgctgctattggaccccaccgtcaagtccaacacctctaaaatggcgtttgtgattgcctccttggcttctgcaaccttcctctgtgtcagcattctgatggaacgcttgcgtcgtaccacgttcctgaacgaggccctcctaacccgagagatgcaagcgtcgcaaatggccgactcaatgctgaaccacaccctgaagaacctgctggcggacgtggcggccagcctcgaggtgtacctggcgggggaggcgcccagcggcgcactggaggacagcgtgacgtgtctgcggcggggcatgatggcgtg

SEQ ID NO: 375 - protein, 110 aa, Euglena gracilis
MPRRRHVTLSSSAPLGASPARYTSRLAATSASRFFRVWFSIESAICDACISRVRRASFRNVVRRKRSIRMLTQRKVAEAKEAITNAILEVLDLTVGSNSSVADRETYTTT

SEQ ID NO: 376 - DNA, 279 bp, Euglena gracilis
atgtgcaccacctatcaagagttctccgacaagttggacaagctcgatgcggagtttgccaagaagatggaggaccagaacaaaaagttctttgcggacaaacccgacgactccactttgtcaccggaaatgaaggaacactatgacaaattcgaaaagatgatcaaggagcacacagacaagttcaataagaagatgcgagaccactcagagcacttcaaacagaagtttgctgagcttttggagcaacagaagaacgcgcagttcccaggcaagtaa

SEQ ID NO: 377 - protein, 92 aa, Euglena gracilis
MCTTYQEFSDKLDKLDAEFAKKMEDQNKKFFADKPDDSTLSPEMKEHYDKFEKMIKEHTDKFNKKMRDHSEHFKQKFAELLEQQKNAQFPGK

SEQ ID NO: 378 - DNA, 240 bp, Eucalyptus grandis
  misc_feature (145)..(145): n is a, c, g, or t
  misc_feature (182)..(182): n is a, c, g, or t
  misc_feature (235)..(235): n is a, c, g, or t
atgatcgtgtttcctctggaacatttactgtgctttcatacaacattttggctgatgtttatgcctccagtgagttttacaagttactgcccttcatgggctctttcttggcaatatcgcagacagaatttgctacgggaaatanttggttatcgtgcagacattgtttgcctacaagaggntcaaagtgatcattttgaggagtttttcgcccctgaattagacaaacatgggntatga

SEQ ID NO: 379 - protein, 79 aa, Eucalyptus grandis
  misc_feature (49)..(49): Xaa can be any naturally occurring amino acid
  misc_feature (61)..(61): Xaa can be any naturally occurring amino acid
  misc_feature (79)..(79): Xaa can be any naturally occurring amino acid
MIVFPLEHLLCFHTTFWLMFMPPVSFTSYCPSWALSWQYRRQNLLREIXGYRADIVCLQEXQSDHFEEFFAPELDKHGX

SEQ ID NO: 380 - DNA, 411 bp, Euphorbia lagascae
atggataccacaaactccaaaatctccatccccacctcttccagacgaccttccacccgcctcttgtttgaccgccgttacggttgggtgtttgatgaatggaaagatccttctgaggaagctctagctggaggccgcggaatgttctgcatattgcctctagcaaaaagtttcctgaactccgccacacagtcggttaaccttgctgcaaattttgctgtcaaagtttacgagaggccagatcttttctcccctcgggcactgcaggaaaatcttcataagcagcttcaaatattcaattctaccccgaagaatccagaaatcagcagctgtttgactgtcgaagataaatttccatcacaaatttccacttctgcttcacatctacagataaaaactggaaagtcatag

SEQ ID NO: 381 - protein, 136 aa, Euphorbia lagascae
MDTTNSKISIPTSSRRPSTRLLFDRRYGWVFDEWKDPSEEALAGGRGMFCILPLAKSFLNSATQSVNLAANFAVKVYERPDLFSPRALQENLHKQLQIFNSTPKNPEISSCLTVEDKFPSQISTSASHLQIKTGKS

SEQ ID NO: 382 - DNA, 366 bp, Eucalyptus tereticornis
  misc_feature (298)..(298): n is a, c, g, or t
  misc_feature (344)..(344): n is a, c, g, or t
atggatgacaatggtgttggcagggcagcgaccaagggacttctcctacatctgggatgtgatgtgacaaccgtaagctcgggggatgagttgttgcatgctgtctctcaggaacacaaggtagttcttatggatatttgcacgcctggtatagacagttacgaagttgccgtccagatacacaggttgtattcacaacatcatgagaggccactcttagtggcaatcactggaagcactgacaaggtaaccaaagagaattgcatgagggttgggatgggatggtgttatcaaaaanctgtgtcccttgataaaatgagaaacgtactgtctgagctactggnatgtgggacatcaaatgtctaa

SEQ ID NO: 383 - protein, 121 aa, Eucalyptus tereticornis
  misc_feature (100)..(100): Xaa can be any naturally occurring amino acid
  misc_feature (115)..(115): Xaa can be any naturally occurring amino acid
MDDNGVGRAATKGLLLHLGCDVTTVSSGDELLHAVSQEHKVVLMDICTPGIDSYEVAVQIHRLYSQHHERPLLVAITGSTDKVTKENCMRVGMGWCYQKXVSLDKMRNVLSELLXCGTSNV

SEQ ID NO: 384 - DNA, 345 bp, Eucalyptus tereticornis
  misc_feature (148)..(148): n is a, c, g, or t
  misc_feature (176)..(176): n is a, c, g, or t
  misc_feature (209)..(209): n is a, c, g, or t
  misc_feature (263)..(263): n is a, c, g, or t
  misc_feature (265)..(265): n is a, c, g, or t
  misc_feature (273)..(273): n is a, c, g, or t
  misc_feature (306)..(306): n is a, c, g, or t
  misc_feature (330)..(330): n is a, c, g, or t
atgtcttcgccttcttcatctaatcttcctctgaaagcaatccccggagattatggcttgcctttcttcggcgcgataaaagaccggctggactacttctaccatgagggtacagacaaattcttccggacccggatgcagaagtacnagtcgacggtcttccggtcaaacatggntcccggccctttcatggcccggaaccctaaggncgtcgtgctcctcgatgccatcagcttcccgattctctttgacacgtctaaggncnaaaaaaangatgtgtttgtcgcaacctacatgccttcgatnaacttcaaggggcgggtaccgtgngtgcgcctaacttga

SEQ ID NO: 385 - protein, 114 aa, Eucalyptus tereticornis
  misc_feature (50)..(50): Xaa can be any naturally occurring amino acid
  misc_feature (59)..(59): Xaa can be any naturally occurring amino acid
  misc_feature (70)..(70): Xaa can be any naturally occurring amino acid
  misc_feature (88)..(89): Xaa can be any naturally occurring amino acid
  misc_feature (91)..(91): Xaa can be any naturally occurring amino acid
  misc_feature (102)..(102): Xaa can be any naturally occurring amino acid
  misc_feature (110)..(110): Xaa can be any naturally occurring amino acid
MSSPSSSNLPLKAIPGDYGLPFFGAIKDRLDYFYHEGTDKFFRTRMQKYXSTVFRSNMXPGPFMARNPKXVVLLDAISFPILFDTSKXXKXDVFVATYMPSXNFKGRVPXVRLT

SEQ ID NO: 386 - DNA, 324 bp, Euphorbia tirucalli
atgcttgatgatagagggacttgtaagattactggcctcccaagaagttcacttcctcaagaaccagccatgggtgatgagaatgcagttactctttttgtacgattgccagatggcaggcgctgcagttgccgatttttcaagtccgacaaggttcagttcctttatgacttcattgactctggcagactagtggagccaccaacttacaatctggttaggccatatcctagatgtatcttttctacaagtgacagctcattgagtttgaatgaagttggtctcacccacatacagggagccttatttttggagatgatatag

SEQ ID NO: 387 - protein, 107 aa, Euphorbia tirucalli
MLDDRGTCKITGLPRSSLPQEPAMGDENAVTLFVRLPDGRRCSCRFFKSDKVQFLYDFIDSGRLVEPPTYNLVRPYPRCIFSTSDSSLSLNEVGLTHIQGALFLEMI

SEQ ID NO: 388 - DNA, 294 bp, Festuca arundinacea
atggattccaccaatgcacagcctgaaggttcaaagccatctgctccccaaaaccccgccatggcttcgtgccggaagaagaaaactgatgatgctaccttccttgaagatgtgaaagagcacatcgacgagttcatcaacgcctccatggacgagcacaagacctgcttcaagaagaccatttcgaagatgtttggcatgtcaaagattgttgcggagcggtccgctgcagcagcagcaaaggaagctgaagtcgagagcgctttgcctcttcagaccagcgtgtcccagtag

SEQ ID NO: 389 - protein, 97 aa, Festuca arundinacea
MDSTNAQPEGSKPSAPQNPAMASCRKKKTDDATFLEDVKEHIDEFINASMDEHKTCFKKTISKMFGMSKIVAERSAAAAAKEAEVESALPLQTSVSQ

SEQ ID NO: 390 - DNA, 375 bp, Fragaria vesca
atgggtgacaacttttgtaatgaaaacttgtttcaggtgttggtgaagatggaatcacagaaaagccaagttgaaaatcagcctattgaaccaaccactactgcacttgctgctggaacaacccctactccccctgctgctgctgcaacccccacatcatgccgaaaaaagaagaatgaacaagctactttcttggaagatgtgaaggatcacattgatgagtttatccacgcttctatggatgaacatgtgtcttgcttcaagaagaccattgacaagatgtttaaaatgtcaaaggttgttgctgagaagaatgctgctgatgccaagggagttgagagttctttgccgcttcaaacaactgtagcagactga

SEQ ID NO: 391 - protein, 124 aa, Fragaria vesca
MGDNFCNENLFQVLVKMESQKSQVENQPIEPTTTALAAGTTPTPPAAAATPTSCRKKKNEQATFLEDVKDHIDEFIHASMDEHVSCFKKTIDKMFKMSKVVAEKNAADAKGVESSLPLQTTVAD

SEQ ID NO: 392 - DNA, 285 bp, Gossypium hirsutum
atggacacgcaaaagagtcaacccgacgagcaaaagagtcaacccgacaaacaatcgtcgtctgctgctgctcccctagtctcgacttcgtgtaggaagaaaaagaacgaagaggccaccttccttgaagacttgaaggatcacatcgatgagttcattaatgcttcaatggaagagcacaaaacttgctttaagaagaccatccagaagatgtttgggatgtcgaaagttgtagcagaaaggagtgcggctgaatccaaggaagctgaaaccgtgtcgaaataa

SEQ ID NO: 393 - protein, 94 aa, Gossypium hirsutum
MDTQKSQPDEQKSQPDKQSSSAAAPLVSTSCRKKKNEEATFLEDLKDHIDEFINASMEEHKTCFKKTIQKMFGMSKVVAERSAAESKEAETVSK

SEQ ID NO: 394 - DNA, 237 bp, Gossypium hirsutum
atggaaacacaaaagagccaggccgagaaacaagcgacgatggcttcatgtagaaagaaaaagaatgaagaagccaccttccttgaagacttgaaggatcacatcgatgagtttgttaatgcatcaatggatgagcataaaacttgctttaagaagaccatccaaaagatgtttggaatgtcaaaaattgtagctgaaaggaatgctgaatcaaaggaaacaacagtatcaaaataa

SEQ ID NO: 395 - protein, 78 aa, Gossypium hirsutum
METQKSQAEKQATMASCRKKKNEEATFLEDLKDHIDEFVNASMDEHKTCFKKTIQKMFGMSKIVAERNAESKETTVSK

SEQ ID NO: 396 - DNA, 351 bp, Glycine max
atgatttctattgttgcagttgcattgcagccaaagccaagtgatccctcattgatcttccctttcctcaaagtgctcgctagaatggattccaacaacaagcagactgatgagaaacgaccagcatcaagagactcattctgccaaagaaagaagtctgagaatgggagttttgtgtctaatttaagaaatcactttcatgaatttatacatgcttctgcggatgaacacaagacatgcttgagaaacacaattcaaaagatattgaatgcatcaaagatttttgggaaagaccgtgacagcacaaatgaaggtgactctgtaccccttcagtcatctacaaagaactag

SEQ ID NO: 397 - protein, 116 aa, Glycine max
MISIVAVALQPKPSDPSLIFPFLKVLARMDSNNKQTDEKRPASRDSFCQRKKSENGSFVSNLRNHFHEFIHASADEHKTCLRNTIQKILNASKIFGKDRDSTNEGDSVPLQSSTKN

SEQ ID NO: 398 - DNA, 504 bp, Glycine max
atgaggtcctacaattacaactcagtcacgaatgacgggcctaagatttggaaggtacatattagaaatggtacgaaggcaaatgctcaatacgaagagcaagctgccacagtatggcagggaaaggggtctgttgtgtgcaagactccttatagggagctgtatgtagaaagctgtattgtggagacaattgtattgtccactggagtcttggagagcatggacactcagaaaagccaacctgaaaagcagtcttcatccgctgcaactgccccatctgttacttcatgccaaaagaagaagaatgaagaagctgctttcttagacgatttgaaggatcacattgacgagtttattaaggcttctatggatgagcacaaaagttgtttcaagaaaataattcagaagatgtttggtatgtccaagactgttgcagaaggtcactccaatgcttccaaagaaattcaaagttctctgcatcttcagacaactgtacaagactag

SEQ ID NO: 399 - protein, 94 aa, Glycine max
MDTQKSQPEKQSSSAATAPSVTSCQKKKNEEAAFLDDLKDHIDEFIKASMDEHKSCFKKIIQKMFGMSKTVAEGHSNASKEIQSSLHLQTTVQD

SEQ ID NO: 400 - DNA, 285 bp, Glycine max
atggacactcagaaaagtcaacctgagaagcagtcttcatccactgcaactgccccatctgttacttcatgtcgaaagaagaagaatgaagaagctgctttcttggacgatttgaaggaccacattgatgagtttattaatgcttctatggatgaacacaaaacttgttttaagaaaacaattcagaagatgtttggtatgtccaaggctgttgcagaaggtcagtccaatgcttccaaagaagttgaaagttctctgcctcttcagacaactgtacaagactag

SEQ ID NO: 401 - protein, 94 aa, Glycine max
MDTQKSQPEKQSSSTATAPSVTSCRKKKNEEAAFLDDLKDHIDEFINASMDEHKTCFKKTIQKMFGMSKAVAEGQSNASKEVESSLPLQTTVQD

SEQ ID NO: 402 - DNA, 255 bp, Glycine max
atggattccaacaatgagaaacgaccagcatcaagagtctcattctgccaaagaaagaagtctgggaacgggagctttgtgtctaatttaagaaatcactttcatgaatttatacacgcttcttcggatgaacacaagagatgcttgagaaacacaattcaaaagatattagatgcatcaaagatttttgggaaaaatggtgacagcacaaatgaaggtgagtatgtaccccttcagtcatctacaaagaactaa

SEQ ID NO: 403 - protein, 84 aa, Glycine max
MDSNNEKRPASRVSFCQRKKSGNGSFVSNLRNHFHEFIHASSDEHKRCLRNTIQKILDASKIFGKNGDSTNEGEYVPLQSSTKN

SEQ ID NO: 404 - DNA, 216 bp, Helianthus annuus
atgatatcttcggttgataccaaatactgtacaaggaagagatctgatgaagctggttttgtggacaatgcaaaggaaaacatgaagtcttttattcatgcctcttttgatgaacacaagacatgcttcaaggcaacttggcacaagatgactgaaatattccaagaagaaaaatctgcaggactagaagcgcaaaaccctcaggcgaagaactaa

SEQ ID NO: 405 - protein, 71 aa, Helianthus annuus
MISSVDTKYCTRKRSDEAGFVDNAKENMKSFIHASFDEHKTCFKATWHKMTEIFQEEKSAGLEAQNPQAKN

SEQ ID NO: 406 - DNA, 240 bp, Helianthus annuus
  misc_feature (178)..(178): n is a, c, g, or t
  misc_feature (190)..(190): n is a, c, g, or t
atggacggaggattatacgaacactacaaggaataccgacattgtgtcaagaacactttgaacgagttagtcggggacgaactcgcaaaacacattaaacttatacactccgaggacgggtccggaatcggtgctgctcttcttgccgcctctcattccaatacatctaggtgtttgngtcccttagaangtgatcagaatcgtgatgttgtcgtatacatacgatatgttctggtctag

SEQ ID NO: 407 - protein, 79 aa, Helianthus annuus
  misc_feature (60)..(60): Xaa can be any naturally occurring amino acid
  misc_feature (64)..(64): Xaa can be any naturally occurring amino acid
MDGGLYEHYKEYRHCVKNTLNELVGDELAKHIKLIHSEDGSGIGAALLAASHSNTSRCLXPLEXDQNRDVVVYIRYVLV

SEQ ID NO: 408 - DNA, 534 bp, Helianthus annuus
atgatttctggcatgtatttgggagaacttgttcgtagagttctatgtaggatggccgatgaggctgctctttttggagatacagtaccccccaaattaaaaactcaattcatattaaggacacctgaaatgtctgcaatgcatcatgacacatcatccgatctcaagttggtagggaacatattgcaagacgtattagagatacccaatacaaccctctcaacaagaaaaatagtggttgaggtatgcaatgtcattgccacacgaggcgctcgcctagccgcggcaggaattctaggcattctaaagaaaaccggacgagacaccgttaaagacagtgaagtccccaagactgtcatcgcgatggacggaggattatacgaacactacaaggaataccgacattgtgtcaagaacactttgaacgaattagtcggggacgaactcgcaaaacacattaaacttatacactccgaggacgggtccggaatcggtgctgctcttcttgccgcctctcattcccaatacatctag

SEQ ID NO: 409 - protein, 177 aa, Helianthus annuus
MISGMYLGELVRRVLCRMADEAALFGDTVPPKLKTQFILRTPEMSAMHHDTSSDLKLVGNILQDVLEIPNTTLSTRKIVVEVCNVIATRGARLAAAGILGILKKTGRDTVKDSEVPKTVIAMDGGLYEHYKEYRHCVKNTLNELVGDELAKHIKLIHSEDGSGIGAALLAASHSQYI

SEQ ID NO: 410 - DNA, 270 bp, Helianthus annuus
aacataatctttgaaacataatgtacagctgccactaaaataacatatattaatcacctaacaggatatgaacaagagtattcaaaatataccaactccactgaaaattcagttataaacgagttatttcaccaaccaaacattattctagtagccagatctaggcacggtttgatgacatgaagcgtaaaatatccaaaactatggtatctacccgtgcgttaaaagatatactctattcagtgacaatggtttgaagaggcaatgcgc

SEQ ID NO: 411 - protein, 89 aa, Helianthus annuus
MATEKSQLPSAAPPAMDSCRKKKSDDATFLQDVKDHIDEFIHASMDEHKTCFKKSISKMFGMSKIVAERTAAESKEVESALPLQTIVTE

SEQ ID NO: 412 - DNA, 192 bp, Helianthus argophyllus
ccgtcgaacataaacgacgacactattcgattttcaaactcccgtcaaatttcaccagttccttccgtttcattgaattgctttcatcttcttcccaccaaatcgaaacgacgtcggagaagaattttactattcataccgagaggttggcgtgtaacacctgtaattacagtgtccattcacttcatgacc

SEQ ID NO: 413 - protein, 63 aa, Helianthus argophyllus
MFCGSVGDNSVSIKDATSKMTSASKQDNSQTCIVSRLVDHIEHFLNHFPHCQKRCIIILYGPR

SEQ ID NO: 414 - DNA, 243 bp, Helianthus argophyllus
atggcaacggaaaaaagtcaacaatctactccatctgcttctgtttctgctccggtggcggcatcatgtagaaggaagaaatcggaagatgcaagtttcttacaggatgtgaaagatcacattgatgagttcatacatgcttccacggatgaacataaaacatgcttccaaaagaccattctaaaggtttgtttttcaaatacagatactatactccgacaaacacaattgttcaatgattaa

SEQ ID NO: 415 - protein, 80 aa, Helianthus argophyllus
MATEKSQQSTPSASVSAPVAASCRRKKSEDASFLQDVKDHIDEFIHASTDEHKTCFQKTILKVCFSNTDTILRQTQLFND

SEQ ID NO: 416 - DNA, 204 bp, Hedyotis centranthoides
atgaagagctgcagtaagatattccttgggtttgtcaatgtgatagttttggcattcgcgattttccaaggtgtgttcgttctgatgtccaatcatgattcctccaataaacactgttacaagaactccggcccggcgattttctgtatctcggcggtggttggtgatcatttctctgttagggttactgagcacttgttgtaa

SEQ ID NO: 417 - protein, 67 aa, Hedyotis centranthoides
MKSCSKIFLGFVNVIVLAFAIFQGVFVLMSNHDSSNKHCYKNSGPAIFCISAVVGDHFSVRVTEHLL

SEQ ID NO: 418 - DNA, 267 bp, Helianthus exilis
atggcaacagaaaagagtcaacaatctactccatctgctccggtggcggcatcatgtagaaggaagaaatcagaagatgcaagtttcttacaggatgtgaaagatcacattgatgagttcatacatgcttccacggatgaacataaaacatgcttccaaaagaccattctaaagatgtttggaatgtctaaggtggttgcacaaacaagtgctgataacacgggagttgagagttcattgtccctgcaaacagttgtttctgattaa

SEQ ID NO: 419 - protein, 88 aa, Helianthus exilis
MATEKSQQSTPSAPVAASCRRKKSEDASFLQDVKDHIDEFIHASTDEHKTCFQKTILKMFGMSKVVAQTSADNTGVESSLSLQTVVSD

SEQ ID NO: 420 - DNA, 270 bp, Helianthus tuberosus
  misc_feature (225)..(225): n is a, c, g, or t
atggcaacagaaaaatcccagcttccttctgctgcacctccagccatggattcatgtagaaagaagaaatcagatgatgcaactttcttgcaagatgttaaagatcacattgatgagttcattcatgcttccatggatgaacacaaaacctgctttaagaaatccatttctaagatgtttggaatgtccaagattgttgcagagagaactgctgcagagagtaangaaagtgagagcgcgttgcctcttcaaaccattgtcactgaatag

SEQ ID NO: 421 - protein, 89 aa, Helianthus tuberosus
  misc_feature (75)..(75): Xaa can be any naturally occurring amino acid
MATEKSQLPSAAPPAMDSCRKKKSDDATFLQDVKDHIDEFIHASMDEHKTCFKKSISKMFGMSKIVAERTAAESXESESALPLQTIVTE

SEQ ID NO: 422 - DNA, 294 bp, Hordeum vulgare
atgtctggcggcgtccaatcttctgtcccccagccatcttcatcttcatctccggtaaagcccgcctcgacttcgtgccgaaagaagaactccggcaacacatcgtttgtcacgcaactgagagatcacttccacgagtttgttcatgcctccatggacgaacacaggacatgcttaactaacactgtcaagaaattgtatgcgatgtcgaaggccgccgcggagagaaccgctggggcaaaagaagctggagctgaaagcgttttgccacttgagagtgaagtgtcacggtag

SEQ ID NO: 423 - protein, 97 aa, Hordeum vulgare
MSGGVQSSVPQPSSSSSPVKPASTSCRKKNSGNTSFVTQLRDHFHEFVHASMDEHRTCLTNTVKKLYAMSKAAAERTAGAKEAGAESVLPLESEVSR

SEQ ID NO: 424 - DNA, 381 bp, Hordeum vulgare
atggatatatcacaaagaaatcttctcaaaggtttaacttctgatgagagtgtcgttgctaaggactcttccacgctaggtgtggtgattgttaagcattgcggatatacggcaatagtgaaagtttcgggacgcacaaagaacagcagcgatggcaaacaaaccagtgatatctctgatcatcttgatgaaatacctaacatcgatgtggatgatcatccagatggaggttctaatgccttgaatgctcacagtctaagaataccactgccgaaaattaccaacccagaaatcgctgccagtagccagcacttgcatcttaaaccacatgttgataattatgcgaggaaactagcatgtacggtacttgaaaccagctga

SEQ ID NO: 425 - protein, 126 aa, Hordeum vulgare
MDISQRNLLKGLTSDESVVAKDSSTLGVVIVKHCGYTAIVKVSGRTKNSSDGKQTSDISDHLDEIPNIDVDDHPDGGSNALNAHSLRIPLPKITNPEIAASSQHLHLKPHVDNYARKLACTVLETS

SEQ ID NO: 426 - DNA, 291 bp, Hordeum vulgare
atggattccagcaatacacagtctgaaggttctcagccacatgttcctaaaaaccctagcatgtcatcgtgccggaagaagaaaaccgatgatgatgctacactccttgaagatgtaaaagagcacattgacgagttcatcaatgcctccatggacgagcacaagacctgcttcaagaagaccattcagaagatgttcgggatgtcaaaggctgttgcggagcggtccgctgcagcaaaggaagctgaagtcgaaagcgccttgcctcttgagaccagtgtgtcccagtag

SEQ ID NO: 427 - protein, 96 aa, Hordeum vulgare
MDSSNTQSEGSQPHVPKNPSMSSCRKKKTDDDATLLEDVKEHIDEFINASMDEHKTCFKKTIQKMFGMSKAVAERSAAAKEAEVESALPLETSVSQ

SEQ ID NO: 428 - DNA, 291 bp, Hordeum vulgare
atggattccggtaacacgcagacagaaggttcccagccacccgttcctaaaaaccctgccatgacgtcgtgccggaagaagaagaccgatgatgatgtcaccttccttgaagatgtgaaagaacacatcgacgagttcatcaatgcatccatggatgagcacaagacctgcttcaagaagaccattcagaagatgtttgggatgtcgaaggctgtcgccgagcggtctgctgctgccaaggaagctgaagtcgaaagcgctttgccccttcagaccagtgtgtcccagtag

SEQ ID NO: 429 - protein, 96 aa, Hordeum vulgare
MDSGNTQTEGSQPPVPKNPAMTSCRKKKTDDDVTFLEDVKEHIDEFINASMDEHKTCFKKTIQKMFGMSKAVAERSAAAKEAEVESALPLQTSVSQ

SEQ ID NO: 430 - DNA, 363 bp, Hordeum vulgare
ccgcccccgcgccccggccccggcccccgcccggccccgccgccccccccccagcccccccgcaccacccccccgcccccccgccaagggacaagcaatcccccctacgcccgccaaagcgcggcgcccaaccggataagagacccgcaaccagacgggtcttccaactggacatcgccaggccaacccatgccccacttaactaagcgaacacaaggacaaagcgaaaaattagactttaggctgataagaccccataactctcagtgaatgaagcttcaggttcatcgaagacgatcacgtgctcaggacgacttcactgagactcagttgccgccggtgctgcttctggcttcgccaccg

SEQ ID NO: 431 - protein, 120 aa, Hordeum vulgare
MMEKKEGGERTEKVEVSDDGGKKPAEEETKPAPATGPVCFKKPAGEDASILETTKGYLKQLGDTNADTHWDCIKNRVRAAREYISSKTSSAFGRQKVEPEAKEETPVAKPEAAPAATESQ

SEQ ID NO: 432 - DNA, 351 bp, Helicosporidium sp.
atggccacactcggtcgcttggctcgcgaggcgtgccgggtcgctcgctctagcggcgtgggtcagctttcgcaggcttctcgtgttactagacaggtgcagcagcggggttttgcttcaggccatggagcgcacgacagtgtcacctacgagggtctcactctgcacaagccggccaagtggcactccgtggttggccacggcctcgcaggcgtcatgtggttctgggtattctaccgcttctaccacgactacgagaccttcctgtttgggcacgccgctcactttgagcacgaacttcatgccgcccatggcgaacatggcaaggagggtgagggcaagaagcattag

SEQ ID NO: 433 - protein, 116 aa, Helicosporidium sp.
MATLGRLAREACRVARSSGVGQLSQASRVTRQVQQRGFASGHGAHDSVTYEGLTLHKPAKWHSVVGHGLAGVMWFWVFYRFYHDYETFLFGHAAHFEHELHAAHGEHGKEGEGKKH

SEQ ID NO: 434 - DNA, 282 bp, Ipomoea nil
atggctactgaaggaggtaaacctgaggcacaaacctcagctgcagctgttaatatggcaacggcttcatgccggaagaagaagtctgaaagtgccacttttttagaagatgtgaaagatcatattgacgagttcatacatgcttcaatggatgaacataaaacgtgcttcaagaaaactatccagaagatgtttggaatgtcgaaagttgttgctgaaagaaatgcggaagtgaaggaggttgaaagcaaacttccactccggacagtcatatctgaatag

SEQ ID NO: 435 - protein, 93 aa, Ipomoea nil
MATEGGKPEAQTSAAAVNMATASCRKKKSESATFLEDVKDHIDEFIHASMDEHKTCFKKTIQKMFGMSKVVAERNAEVKEVESKLPLRTVISE

SEQ ID NO: 436 - DNA, 468 bp, Leymus chinensis
atgaaaggttaccttaatgatccggaggccacaaagaacaccattgacaaagacggttggctgcatactggagacattggttatgtcgatgatgacgacgagatcttcattgtcgacaggctcaaggagataatcaaatacaagggattccaagtacctcctgcggaacttgaagcccttctcattacacacgccgaaatcaaagatgctgctgtcgtatcgatgcaagatgaacttgctggtgaagttccagttgcattcattgtgcggattgaaggttctgagatcagcgagggcgagatcaagcagtttgttgcaaaagaggttgttttctacaagaggatccacaaagttttcttcgcggactcggttccgaagagtcctgccggcaagatcctcaggaaggacttgagagcaaagcttgctgcaggcatcccaggcagtggaagcacacagtccaaaagctga

SEQ ID NO: 437 - protein, 155 aa, Leymus chinensis
MKGYLNDPEATKNTIDKDGWLHTGDIGYVDDDDEIFIVDRLKEIIKYKGFQVPPAELEALLITHAEIKDAAVVSMQDELAGEVPVAFIVRIEGSEISEGEIKQFVAKEVVFYKRIHKVFFADSVPKSPAGKILRKDLRAKLAAGIPGSGSTQSKS

SEQ ID NO: 438 - DNA, 279 bp, Lotus japonicus
  misc_feature (264)..(264): n is a, c, g, or t
gggagtcagtcacaaaaatgaaaaagtgctacttagcagtgaaacataaatacatgacaaatctataatcattgtagtcaaaacttgaaaattttaaggtcataggatctatcatagacattcttattactccagtccagtcatagatccacaaaagcattctagttccttgtagatgaatgaaggggcaaagaattttcaccttggtctatgctgtcactgttttttccgaaactctttgatacattaaatatcttttgaatngtgttcctcaagcat

SEQ ID NO: 439 - protein, 92 aa, Lotus japonicus
  misc_feature (11)..(11): Xaa can be any naturally occurring amino acid
MGSKENQTDEXLPVNSAPRVSFCPRNESGNGSFVSSLRNHFHEFIHASVDEHKTCLRNTIQKIFNVSKSFGKNSDSIDQGENSLPLHSSTRN

SEQ ID NO: 440 - DNA, 276 bp, Lotus japonicus
atgagcactcagacaagccaacctgaaaagcagtcttcatcagttgccactgtcgcttcatgtcgaaagaagaagagtgaagacgccactttcttggaggatgtaaaggatcacattgacgagtttattcatgcttctatggatgaacacaaaacctgttttaagaagacaattcagaagatgtttggtttgtccaaggcaggttcagaaacgaactccaatgctgtgaaagaagttgaaagttctctgccgcttcagacaactgtacaagattaa

SEQ ID NO: 441 - protein, 91 aa, Lotus japonicus
MSTQTSQPEKQSSSVATVASCRKKKSEDATFLEDVKDHIDEFIHASMDEHKTCFKKTIQKMFGLSKAGSETNSNAVKEVESSLPLQTTVQD

SEQ ID NO: 442 - DNA, 276 bp, Lotus japonicus
atgagcactcagacaagccaacctgaaaagctgtcttcatcggttgccactgttgcttcatgtcgaaagaagaagagtgaagaagccactttcttggaggatgtaaaggatcacattgacgagtttattaatgcttctatggatgaacacaaaacctgctttaagaagacaattcagaagatgtttggtttgtccaaggcagttgcagaaaagaactccaatgctgtgaaagaagttgaaagttctctgcctcttcagacaaccgtacaagattaa

SEQ ID NO: 443 - protein, 91 aa, Lotus japonicus
MSTQTSQPEKLSSSVATVASCRKKKSEEATFLEDVKDHIDEFINASMDEHKTCFKKTIQKMFGLSKAVAEKNSNAVKEVESSLPLQTTVQD

SEQ ID NO: 444 - DNA, 249 bp, Lactuca saligna
atgtcaacagagaaagcaccagccatggattcctgcagaaagaagaagtcagatgacgccacatttcttcaggatgttaaagatcacatcgatgagtttgttcatgcttccatggatgaacacaaaacctgcttcaaaaagaccatatcaaagatgtttgggatgtcaaaagttgttgcagagagaaatgctgctgagaataaggggatcgaaagctcgttgcctcttcgaaactgtgttttccgataa

SEQ ID NO: 445 - protein, 82 aa, Lactuca saligna
MSTEKAPAMDSCRKKKSDDATFLQDVKDHIDEFVHASMDEHKTCFKKTISKMFGMSKVVAERNAAENKGIESSLPLRNCVFR

SEQ ID NO: 446 - DNA, 267 bp, Lactuca saligna
atgacatcagaaaaaagtcaaccctcagttgcttctgctccagttattacatcatgtcgaaggaaaaagtcagatgatacaactttcttggaggatgtaaaagatcacattgatgagtttataaatgcttccatggatgaacacaagacatgcttccaaaagaccatctcaaagatgtttggtatgtctaaagttgttgcagaaagaaattctaataacaaggaaattgagagttcactatccctgcaaacagttgtttctgattag

SEQ ID NO: 447 - protein, 88 aa, Lactuca saligna
MTSEKSQPSVASAPVITSCRRKKSDDTTFLEDVKDHIDEFINASMDEHKTCFQKTISKMFGMSKVVAERNSNNKEIESSLSLQTVVSD

SEQ ID NO: 448 - DNA, 249 bp, Lactuca saligna
atgtcaacagagaaagcaccagccatggattcctgcagaaagaagaagtcagatgacgccacatttcttcaggatgttaaagatcacatcgatgagtttgttcatgcttccatggatgaacacaaaacctgcttcaaaaagaccatatcaaagatgtttgggatgtcaaaagttgttgcagagagaaatgctgctgagaataaggggatcgaaagctcgttgcctcttcgaactgttgtttccgattaa

SEQ ID NO: 449 - protein, 82 aa, Lactuca saligna
MSTEKAPAMDSCRKKKSDDATFLQDVKDHIDEFVHASMDEHKTCFKKTISKMFGMSKVVAERNAAENKGIESSLPLRTVVSD

SEQ ID NO: 450 - DNA, 198 bp, Lactuca serriola
atgacgccacatttcttcaggatgattaaagatcacatcgatgagtttgttcatgcttccatggatgaacacaaaacctgcttcgacaagaccatatcaaagatgtttgggatgtcaaaagttgttgcagtgagaaatgctgctgacaataagggaattgaaagctcattgcctcttcgaactgttgtttccgattaa

SEQ ID NO: 451 - protein, 65 aa, Lactuca serriola
MTPHFFRMIKDHIDEFVHASMDEHKTCFDKTISKMFGMSKVVAVRNAADNKGIESSLPLRTVVSD

SEQ ID NO: 452 - DNA, 267 bp, Lactuca serriola
atgacaacagaaaaaagtcaaccccctgttgcttctgctccagttattacatcatgtcgaaggaaaaagtcagatgatacaactttcttggaggatgtaaaagatcacattgatgagtttataaatgcttccatggatgaacacaagacatgcttccaaaagaccatctcaaagatgtttggtatgtctaaagttgttgcagaaagaaattctaataacaaggaaattgagagttcactatccctgcaaacagttgtttctgattag

SEQ ID NO: 453 - protein, 88 aa, Lactuca serriola
MTTEKSQPPVASAPVITSCRRKKSDDTTFLEDVKDHIDEFINASMDEHKTCFQKTISKMFGMSKVVAERNSNNKEIESSLSLQTVVSD

SEQ ID NO: 454 - DNA, 303 bp, Lolium temulentum
ctacctaaggattatgcttattgacactgaaaacattttttgctacagaggacaccattgcatcacgtttctaatgtgacacttcagtcttaagtgacaaaacgctttcagctccagcttcttttgcttcgttgcttctctctgcaacagcctttgacatcgcaaacattttcttgacagtgtttgttatacatgtcctgtggtcatccatagaggcgtgaacgaactcgtggaagtgatctctcagttccgtgacaaacgaggtgctgccagagttcttttttcggcacgaagtcgaggcag

SEQ ID NO: 455 - protein, 100 aa, Lolium temulentum
MQFPTMSGGTQSEGSQPSAAPVKPASTSCRKKNSGSTSFVTELRDHFHEFVHASMDDHRTCITNTVKKMFAMSKAVAERSNEAKEAGAESVLSLKTEVSH

SEQ ID NO: 456 - DNA, 195 bp, Linum usitatissimum
atggctatatggcaactttcgtgccaaagtatgcactcgatgacatcggttccggatcccatgtccatgtcagcttgtcgcagaatggagagaacgtattcatgggaactgaaacttcatcctctcagcatggaatctccaaagttgggagggagttcatgtcaggagttctccaccaccttccttcagttctag

SEQ ID NO: 457 - protein, 64 aa, Linum usitatissimum
MAIWQLSCQSMHSMTSVPDPMSMSACRRMERTYSWELKLHPLSMESPKLGGSSCQEFSTTFLQF

SEQ ID NO: 458 - DNA, 468 bp, Linum usitatissimum
atgatgtactacggctgcttcctcgactttggacctgacctgcccgcttggtcccccgacccggaaaatgcaatcatgactaatgtgggtcagctcttagagagacgaggggaggagtttctggaatcaaagtacaaggatcccgtttcaagttttgctgactttcaggagttctcagtctcaaacccggaagtttactggaagactgtgtttgatgaaatggaaattatgttctcagttcctccggaatgtattctacgtgaggattcgtctcatgagagccccacggtaaaccccggcggtgaatggcttcctggagcgaatctcaatcctgcgaaaagttgtctgagttgcaataggaagagaactttggatgatgtagtgttgagatggcgtgacgaaggaaatgatgatatccctgtgtgcagcatggacactttgaggagttgcgtcaagaagtctggttag

SEQ ID NO: 459 - protein, 155 aa, Linum usitatissimum
MMYYGCFLDFGPDLPAWSPDPENAIMTNVGQLLERRGEEFLESKYKDPVSSFADFQEFSVSNPEVYWKTVFDEMEIMFSVPPECILREDSSHESPTVNPGGEWLPGANLNPAKSCLSCNRKRTLDDVVLRWRDEGNDDIPVCSMDTLRSCVKKSG

SEQ ID NO: 460 - DNA, 195 bp, Linum usitatissimum
atggctatatggcaactttcgtgccaaagtatgcactcgatgacatcggttccggatcccatgtccatgtcagcttgtcgcagaatggagagaacgtattcatgggaactgaaacttcatcctctcagcatggaatctccaaagttggtagggagttcatgtcaggagttctccaccaccttccttcagttctag

SEQ ID NO: 461 - protein, 64 aa, Linum usitatissimum
MAIWQLSCQSMHSMTSVPDPMSMSACRRMERTYSWELKLHPLSMESPKLVGSSCQEFSTTFLQF

SEQ ID NO: 462 - DNA, 276 bp, Linum usitatissimum
atggaggcatcaaaagggtcagaggaaaagcagcaacaggagcaaccaaagccagtagaatcatgccgcaagtacaagaaggacgacgccagttttctggaagacgtgaaagatcacatcgacgagttcatcaacgcatcgatggacgagcacaagtcttgctttaagaaaaccatcaataagatgtttagcatgacgaggattgttgagaagaagcaagccgaagctgaaggcgtcgaaagtgttctcccccttcaaactagcgtgtctaaatga

SEQ ID NO: 463 - protein, 91 aa, Linum usitatissimum
MEASKGSEEKQQQEQPKPVESCRKYKKDDASFLEDVKDHIDEFINASMDEHKSCFKKTINKMFSMTRIVEKKQAEAEGVESVLPLQTSVSK

SEQ ID NO: 464 - DNA, 249 bp, Lactuca virosa
atgacaacagagaaggcaccagccatggattcctgcagaaagaagaagtcagatgacgccacatttcttcaggatgtaaaagatcacatcgatgagtttgtacacgcttccatggatgaacacaaaacctgcttcaagaagaccatatccaagatgtttgggatgtcaaaagttgttgcagagagaaatgctgctgagaataagggaattgaaagctcattgcctcttcgaactgttgtttccgattaa

SEQ ID NO: 465 - protein, 82 aa, Lactuca virosa
MTTEKAPAMDSCRKKKSDDATFLQDVKDHIDEFVHASMDEHKTCFKKTISKMFGMSKVVAERNAAENKGIESSLPLRTVVSD

SEQ ID NO: 466 - DNA, 267 bp, Lactuca virosa
atgacaacagaaaaaagtcagccccctgttgcttctgctccagttattacgtcatgtcgaaggaaaaagtcagatgatacaactttcttggaggatgtaaaagatcacattgatgagtttataaatgcttccatggatgaacacaagacatgcttccaaaagaccatctcaaagatgtttggtatgtctaaagttgttgcagaaagaaattctaataacaaggaagttgagagttcactatccctgcaaacagttgtttctgattag

SEQ ID NO: 467 - protein, 88 aa, Lactuca virosa
MTTEKSQPPVASAPVITSCRRKKSDDTTFLEDVKDHIDEFINASMDEHKTCFQKTISKMFGMSKVVAERNSNNKEVESSLSLQTVVSD

SEQ ID NO: 468 - DNA, 285 bp, Musa acuminata
atgatggagtcagccaagggtcgatcggaggtggagttccccggccgtgccgtctcgccttgttggaagaagaaggcgcccgacgccggcttcttggccaacgtcaaggaccacttggaccagttcgtcagcacgcccatggatcagcataggatttgtctcaagaagacgatcagaggggtaggtgacctcgtcaagcttaggaagcaaagcaaggaagcaaggcaagctattgcgtcgtcggattccgcttccaaagacggagacgtggatacgtcgaggtag

SEQ ID NO: 469 - protein, 94 aa, Musa acuminata
MMESAKGRSEVEFPGRAVSPCWKKKAPDAGFLANVKDHLDQFVSTPMDQHRICLKKTIRGVGDLVKLRKQSKEARQAIASSDSASKDGDVDTSR

SEQ ID NO: 470 - DNA, 273 bp, Musa acuminata
atggaagcacaaaaacctcaatccgaaaagctgcggtcagttgatcaagccatggcctcatgccgaaagaagaaatcggaggaagctagctttttggaggatctgagagaccatatggacgaattcattaatgcctctatggatgagcacaaatcttgctttaaaaagactatccaaaagatgtttggaatgtcaaagagtgttgcacagaggacttcagaaaccaaagaagtggaaagttctgtgccacttgagaccaccgtggttcagtga

SEQ ID NO: 471 - protein, 90 aa, Musa acuminata
MEAQKPQSEKLRSVDQAMASCRKKKSEEASFLEDLRDHMDEFINASMDEHKSCFKKTIQKMFGMSKSVAQRTSETKEVESSVPLETTVVQ

SEQ ID NO: 472 - DNA, 537 bp, Mesembryanthemum crystallinum
atgtgggcttccactaccccaaccacaatcacacccttcttcgtctcaatccccaaacttccaccaccatcacacaagttcaccaccacccaaaacgccgccacactacggcgtagccaccaggtctccgtcacttccgacgacgtcagtgggctgggcctagcagtcctcggctccctccgctccggcccacaaacaacaacaacaaccaacaataacgcgggttcgggttcgggttcaagtaccccgaagcagaaggtcaaacacaaacgagatgaaccgaagaaagaggaaaaggggaaagagatgagcgggtcggatatcttgcgggctttgcagaaggccaccgcccgaaaagcccagattagcaccaacaagaggaagcagcagcagaagatgaatctgaataggagagagaatccgaatgtgaatcgggttgttgattacgataaggtccgacccattaccatcaagagcgattggactacccgattggacgacttgcagaaacgtctcgatgagttcttaagcttgtga

SEQ ID NO: 473 - protein, 178 aa, Mesembryanthemum crystallinum
MWASTTPTTITPFFVSIPKLPPPSHKFTTTQNAATLRRSHQVSVTSDDVSGLGLAVLGSLRSGPQTTTTTNNNAGSGSGSSTPKQKVKHKRDEPKKEEKGKEMSGSDILRALQKATARKAQISTNKRKQQQKMNLNRRENPNVNRVVDYDKVRPITIKSDWTTRLDDLQKRLDEFLSL

SEQ ID NO: 474 - DNA, 420 bp, Mesembryanthemum crystallinum
tgtatgatcatcttcaagcaatggagggctctgatctctccctctccaaccccaactcatctccggcgagctccccggcgagtcggccgccgacccggccacccctctctctccattgtaaatgacatttttgtccctaggagcaattgcaatagggggtgacttttgtgcatccttagcaatacttttgttattattaacttcatttcttttggttagttgaagagtggcttgaagatggcatttatgtaattttgctgccagagtggaagaaagaagcttagaagaagatgattgggacccactgttggggaagttggttctagccctgggcccacacatgagccttgcagcttcatcatatgctcttgctgcatcctctgccgtttcgaacgtccctagccaaatacgcgttttcaa

SEQ ID NO: 475 - protein, 139 aa, Mesembryanthemum crystallinum
MCGPRARTNFPNSGSQSSSSKLLSSTLAAKLHKCHLQATLQLTKRNEVNNNKSIAKDAQKSPPIAIAPRDKNVIYNGERGVAGSAADSPGSSPEMSWGWRGRDQSPPLLEDDHTHIEQMIEELLDYGYFELCNTTHTNS

SEQ ID NO: 476 - DNA, 276 bp, Malus x domestica
ttccagcaccaacaacaattccagccgttccagccctcccgacgacacggaggacagggacaacaacaacagcaaagcgaggagaaccaagaccgccaccagaaggtccgacacatcagagagggtgatatcatcgccttgcccgccggtgtcgcttactggagctacaacaacggcaaccaggatctcgttgctatctccctccttgacttcagcaacgagcagaaccagctcgaccaacagcctaggagattttatctagctggcaacccacaa

SEQ ID NO: 477 - protein, 91 aa, Malus x domestica
MESQKTQHEPSPAAANPAATSCRKKKNEQATFLEDLKDHIDDFVNASMDEHKTCFKKTMNKMFGMSKIVSKRSADTKEVESTLPLQTTVAK

SEQ ID NO: 478 - DNA, 486 bp, Manihot esculenta
atggtcctctcagtcctcttatgtgccttgatttgctcacttggattgaattccattattaggtgtgcattaaggtgctctaacttagtagcttctgagtctgctagcaattccacaactcaattagccaatacaggagtcaagcgaaaagcattaaagactttcccaacagtaaactactcaactgacatgaagctgccttgtctggacacagagtgtgcgatatgtctttcagatttcacacctggtgagcgtgtgcgtcttttgcccaagtgcaaccatggatttcatgtccggtgcatcgacaagtggctcagttcacactcgtcctgccctacttgcagacactgccttattgagacatgccaaaagattgttggttgcagccaatctacctcatcagaacctccaccagtgcaagaaagtattgtgaacatagcaccactagaacctgaaggtttgatacgcaattacagagttagctaa

SEQ ID NO: 479 - protein, 161 aa, Manihot esculenta
MVLSVLLCALICSLGLNSIIRCALRCSNLVASESASNSTTQLANTGVKRKALKTFPTVNYSTDMKLPCLDTECAICLSDFTPGERVRLLPKCNHGFHVRCIDKWLSSHSSCPTCRHCLIETCQKIVGCSQSTSSEPPPVQESIVNIAPLEPEGLIRNYRVS

SEQ ID NO: 480 - DNA, 210 bp, Mentha piperita
gcctaatgcggattctagtccactccggattcttcgacaaggtcaaggtcaaggtcaaggtcgagggcgaggacgaagaagaagaggaagatgcttattccctaactccagcttcgcgcctcttgttgaggagcgagcccttgagcgtggcgcctttcgcgctcgccatgtcggaccccgtctacacggagacatggcaccatctgagcg

SEQ ID NO: 481 - protein, 69 aa, Mentha piperita
MSSRIWYRTQPQHRCGTIRSDGAMSPCRRGPTWRARKAPRSRARSSTRGAKLELGNKHLPLLLRPRPRP

SEQ ID NO: 482 - DNA, 303 bp, Marchantia polymorpha
atgagcagcgattcgggaaatcgcagagctgaggcggaagctgagcgtggaccgcctttgcagcctcagcagtcgtcatgtcggaagaagaaggccgacgtgaacgagggatttgtcaaggatgtgatggatcacatcaacgagtttgtgaacgcgtcgtatgatgagcacaagacttgtctgacgaagaccgtccgtaagctctttggcggaatgtcgaaactagggcaaaatccaccagcttcagcacctgcccccgttgtcagcgtcttaccactgcgagccaatatctcctccgattga

SEQ ID NO: 483 - protein, 100 aa, Marchantia polymorpha
MSSDSGNRRAEAEAERGPPLQPQQSSCRKKKADVNEGFVKDVMDHINEFVNASYDEHKTCLTKTVRKLFGGMSKLGQNPPASAPAPVVSVLPLRANISSD

SEQ ID NO: 484 - DNA, 375 bp, Malus sieboldii
atgttgccagaaatacccttctgcaaccccccaaaaaatccccatcttcatcactgtcgttcaaaacaacattatttttcaccgagttatgtgggctcttttggagtttttgttgtcttggtcagagttttcacagagaaaacaggaaagcaagaaacttctcctcccttcccaccccctctctctccttttattttcttccttgtctttcttgtttctctctctctccacctctccccttctttattatttcctccccaactctctcttccttttccttacccatctcctcctgcccctctttctatctcttctccctgtaattcttggtttttgggttctgggttgctttacttttatctccctgtgatctga

SEQ ID NO: 485 - protein, 124 aa, Malus sieboldii
MLPEIPFCNPPKNPHLHHCRSKQHYFSPSYVGSFGVFVVLVRVFTEKTGKQETSPPFPPPLSPFIFFLVFLVSLSLHLSPSLLFPPQLSLPFPYPSPPAPLSISSPCNSWFLGSGLLYFYLPVI

SEQ ID NO: 486 - DNA, 276 bp, Medicago truncatula
atggacactcagaaaaaccaagctgaaaagccaacttcatcagctgctgttgccacttcttgtcgaaagaagaagcatgaagaagcctcattcttggaggatgtgaaggatcacattgacgagtttattaatgcttctatggatgaacacaaaacctgctttcagaaaacaattaagaagatgtttggtttgtccaaggtagtggctgaagcgaattccaaggctacaaaagaagttgaaagttctttgcctcttcagacagttttaaaagagtaa

SEQ ID NO: 487 - protein, 91 aa, Medicago truncatula
MDTQKNQAEKPTSSAAVATSCRKKKHEEASFLEDVKDHIDEFINASMDEHKTCFQKTIKKMFGLSKVVAEANSKATKEVESSLPLQTVLKE

SEQ ID NO: 488 - DNA, 258 bp, Nuphar advena
atggcatcagaacaagcccagtcatctactagtgctcctacttcatgtaggaggaagaagtcagaggatgccacctttctggctgatttaagggatcatattgatgaatttatccatgcttctatggatgagcataagacatgtttccagaagaccattcaaaagatgtttcgaatgtcaaaagctgtgtcagagaaacattcggagtctaatggagttgaaagtgtactgcctctccaaacaacagtctccaaatag

SEQ ID NO: 489 - protein, 85 aa, Nuphar advena
MASEQAQSSTSAPTSCRRKKSEDATFLADLRDHIDEFIHASMDEHKTCFQKTIQKMFRMSKAVSEKHSESNGVESVLPLQTTVSK

SEQ ID NO: 490 - DNA, 357 bp, Nicotiana benthamiana
aagatagaatgcacgatatcgtgaagaacgaggttgaaagcgcaggggaagctacgtggaaagagatgatgatgcggatcttcactaaaatggatgaagaagtcgttgagtattcgagaggaggcggtggtgcaccaaccgctgattgtagatgtgaacttcagacgccgcagtgtgatgcagttggatccactgctgtcgtagcggtggtaactccaaacgaaatcgttgtgtccaattgcggtgactctcgcgctgtgctttgcagaaatggcgttgctattcctctttccactgatcataagccggatcgacccgatgaactcagtcggattgaagaagctggcggtcgtgtta

SEQ ID NO: 491 - protein, 118 aa, Nicotiana benthamiana
MISGKRNSNAISAKHSARVTAIGHNDFVWSYHRYDSSGSNCITLRRLKFTSTISGWCTTASSRILNDFFIHFSEDPHHHLFPRSFPCAFNLVLHDIVHSIFTFHRSLYKIIIEKRTSS

SEQ ID NO: 492 - DNA, 189 bp, Nelumbo nucifera
atgaccggaggcccgtattgcaggcctaaacattggaagcgaaacacggcaatcgccatgttcggcgtctttctcatctgcattcccatcgccatgaaatccgctgagctcgagcaacgtccgcatcatcctgtccgtccaattccttcgcagctctggtgcaagaattttggaaataaggaatattag

SEQ ID NO: 493 - protein, 62 aa, Nelumbo nucifera
MTGGPYCRPKHWKRNTAIAMFGVFLICIPIAMKSAELEQRPHHPVRPIPSQLWCKNFGNKEY

SEQ ID NO: 494 - DNA, 282 bp, Nicotiana sylvestris
atggctgatgactatggtgttttaaggaataaaactgatcatgtatcgaacagtgttaattacagtgttggtgaacattatattgaacctgtctatggagatgatgttgatgattatgaggatgactgtgatgaagaggatgaggaagatggattggccgatgaaaatgtccaaagatactttgatgccgggtccgaggaagaagggaatagatttatggatggagaacttgttgaaaacctaaataaagattcagaatcatcatccgagtatagtgattga

SEQ ID NO: 495 - protein, 93 aa, Nicotiana sylvestris
MADDYGVLRNKTDHVSNSVNYSVGEHYIEPVYGDDVDDYEDDCDEEDEEDGLADENVQRYFDAGSEEEGNRFMDGELVENLNKDSESSSEYSD

SEQ ID NO: 496 - DNA, 264 bp, Nicotiana tabacum
atgtcaaccgagaagattccagcgcaaacagcacctgctgttgcatcatcatgccgaaaaaagaagtctgaaagtgccacgtttttggaggatgtaaaggatcacattgatgaatttataaatgcctcaatggatgaacacaagacttgtttcaagaagaccatccagaagatgtttgggatgtctaaaattgttgctgaaagaaatgctgaagcaaaggaggttgagagctcacttcctctccgaactgttgtatctgagtaa

SEQ ID NO: 497 - protein, 87 aa, Nicotiana tabacum
MSTEKIPAQTAPAVASSCRKKKSESATFLEDVKDHIDEFINASMDEHKTCFKKTIQKMFGMSKIVAERNAEAKEVESSLPLRTVVSE

SEQ ID NO: 498 - DNA, 282 bp, Nicotiana tabacum
atggcagcagaaaatgtccaaaatgagaagacaccatcccctgtttctccaaatccagccatgacttcatgtagaaagaagaagaacgaagaagcgacttttctggaagatatcaaggatcacattgatgaattcatccatgcttccatggatgaacataaaacctgcttcaagaagaccatccaaaagatgttcggcatgtcaaaagttgttgcagagaggaatgccaaggctaaagaggttgaaagttctctgcccctgcaaacaacattgaccgagtag

SEQ ID NO: 499 - protein, 93 aa, Nicotiana tabacum
MAAENVQNEKTPSPVSPNPAMTSCRKKKNEEATFLEDIKDHIDEFIHASMDEHKTCFKKTIQKMFGMSKVVAERNAKAKEVESSLPLQTTLTE

SEQ ID NO: 500 - DNA, 435 bp, Nicotiana tabacum
atggatggtgagttactttcagatcctagtgaatataggagcatggttggtgctcttcaatatttgactatgactcatccggatattgcctatgctgtaaatgttgtctctcaatttatgcatgctccccgtaccactcacatgcattgtgtcaagcgtactttcaggtacttgcagggtactctgacttatggtctaactttgcgtgccctatctctgactttcatggttattgcctactcggatgccgattgggctggttgtccagatagtcgccgttctacttcaggtattgctatgtttctaggatctaatcttatctcttggcgtgcaaagaagcagccaacagtttcaaaatcgtctacagaggtcgagtatcgggctattgcatacactgttgctgagacttgttggattctgtcacattctttgtga

SEQ ID NO: 501 - protein, 144 aa, Nicotiana tabacum
MDGELLSDPSEYRSMVGALQYLTMTHPDIAYAVNVVSQFMHAPRTTHMHCVKRTFRYLQGTLTYGLTLRALSLTFMVIAYSDADWAGCPDSRRSTSGIAMFLGSNLISWRAKKQPTVSKSSTEVEYRAIAYTVAETCWILSHSL

SEQ ID NO: 502 - DNA, 285 bp, Nicotiana langsdorffii x sanderae
atgcttgtacccgctgttcctgatacctctctttgccgccagaagtactccgatgattgcgaagctgctattaatgaacagatcaatgtggaatacaataattcatatgtttatcatgcgatgtttgcctatttcgatcgagacaacgttgctctcaagggtctcgccaagtttttcaaggaatcaagtctagaggaaagacagcacgctgagaaattgatggaattccagaacaagcgcggtggggagggtgaagctgctatctatctgtgcgccacctactga

SEQ ID NO: 503 - protein, 94 aa, Nicotiana langsdorffii x sanderae
MLVPAVPDTSLCRQKYSDDCEAAINEQINVEYNNSYVYHAMFAYFDRDNVALKGLAKFFKESSLEERQHAEKLMEFQNKRGGEGEAAIYLCATY

SEQ ID NO: 504 - DNA, 360 bp, Oryza glaberrima
ttaagaggaggagaccattgtcttatctccctggatctcagcaggcacttggcacctgccttgaggtcggtcagttcggattagatgaagagatcgacaggctaaagcgtgacaagaacatcttactcgcggaggttgtgaaactaaggcacaagcagcaaagcacgaaagccaatatgcgagccatggaagagaggctgcaacatgcggagcagaagcaggtccagatgatgggtttcttggcaagagcaatgcagaaccctgacttctttcaccagttgattcaccagcaggataaaatgaaggggctcgaggacacattctcgaagaagaggacgaggtcgatagacatagtgccat

SEQ ID NO: 505 - protein, 119 aa, Oryza glaberrima
MALCLSTSSSSSRMCPRAPSFYPAGESTGERSQGSALLLPRNPSSGPASAPHVAASLPWLAYWLSCFAACALVSQPPRVRCSCHALACRSLHLIRTDRPQGRCQVPAEIQGDKTMVSSS

SEQ ID NO: 506 - DNA, 309 bp, Oryza sativa
atggaggagaagggtgcggaggcgatgacgcagaaggcgccggagaaggaggcggcggcgatggcgtgctaccggaggacggtgggggaggaggcgacgttcaaggagagatccaaggacctgttccggcagttcaaggacgcgccggcgggggatcactgggtctgcctcaagaacaaggtccgcgccgccggcgagtacgccaccctccgtactcgccagggcatcaccatgttcggcgagccaaatgtcggcgacctcttgggaagaaccaaggatgacgactccaagaagacgccttccgcgtaa

SEQ ID NO: 507 - protein, 102 aa, Oryza sativa
MEEKGAEAMTQKAPEKEAAAMACYRRTVGEEATFKERSKDLFRQFKDAPAGDHWVCLKNKVRAAGEYATLRTRQGITMFGEPNVGDLLGRTKDDDSKKTPSA

SEQ ID NO: 508 - DNA, 339 bp, Oryza sativa
atggagaaagagggcggagtgaaggcggcggcggaggcggaggcggaggcggagggggagatcgtggcggcgccggcggagaaggtggcgtgcttcaagaagacggcgggggaggaggcggacgcgacgttcatggagcgcgtcaaggactactataaccagctcaaggagagctccgccgagaagcactggatctgcatcaaggacaagttccgcgccgccggcgagtacgtctcacagaagagcagctcggtgttcggcaagaagaaggtcgagcccgtggtcaaggatgctgcagttccaggggaggcgagttcggtgacagtcgagtctcagtga

SEQ ID NO: 509 - protein, 112 aa, Oryza sativa
MEKEGGVKAAAEAEAEAEGEIVAAPAEKVACFKKTAGEEADATFMERVKDYYNQLKESSAEKHWICIKDKFRAAGEYVSQKSSSVFGKKKVEPVVKDAAVPGEASSVTVESQ

SEQ ID NO: 510 - DNA, 321 bp, Secale cereale
  misc_feature (120)..(120): n is a, c, g, or t
  misc_feature (234)..(234): n is a, c, g, or t
atgaaaggggtgcagtcggtggagatcaaccggaagcagtacaaggtgacggtgcagggattcgtggagccgcacaaggtggtgaagcgggtgcaggccaccgggaagaaggcagagatntggccatacatcccctacaacctggtggcgcacccctacgccgcgcagacctacgacaagaaggcgcccccgggctacgtgcgcaaggtggacgccgtcatgcccgtcgccagntacggcggccccggcgccggcgcgcaggaggagcggctcaccaccatgttcagcgacgacaaccccaacgcctgctccgtcatgtga

SEQ ID NO: 511 - protein, 106 aa, Secale cereale
  misc_feature (40)..(40): Xaa can be any naturally occurring amino acid
  misc_feature (78)..(78): Xaa can be any naturally occurring amino acid
MKGVQSVEINRKQYKVTVQGFVEPHKVVKRVQATGKKAEXWPYIPYNLVAHPYAAQTYDKKAPPGYVRKVDAVMPVAXYGGPGAGAQEERLTTMFSDDNPNACSVM

SEQ ID NO: 512 - DNA, 285 bp, Oryza sativa
atggaatccagcaagacacaatctcaaggttctgcctctgttccaaagaacccagccatgtcctcttgtcggaagaagaagtctgacgacgttacgttcctcgaagatctgaaagaccatatcgacgagttcatccacgcctccatggatgagcacaagcattgcttcaaaaacaccatccagaagatgtttgggatgtcaaaggttgtcgcagagcgttccgctgaagcaaaagaagctgaagtcgagagcgctttgcctcttcagaccagtgtctcgcagtag

SEQ ID NO: 513 - protein, 94 aa, Oryza sativa
MESSKTQSQGSASVPKNPAMSSCRKKKSDDVTFLEDLKDHIDEFIHASMDEHKHCFKNTIQKMFGMSKVVAERSAEAKEAEVESALPLQTSVSQ

SEQ ID NO: 514 - DNA, 294 bp, Oryza sativa
atgtcgatgcctggtgatgcccaacctgaaggttctcaccaatccgcttcctccgcaaaacctgccttgtcatcgtgccggaggaataaatctgagaacacgtcatttgtctcagatttgagagatcacatccaggagtttatccatgcttccccgaatgagcacaggacctgttttaccaagactatcaagagaatgtttggcatgtcaaaggtcgttgcagagagatccaccgaagcaaaggaacctggagctgaaagtgttttgccacttcagaccacggtgtcgcggtag

SEQ ID NO: 515 - protein, 97 aa, Oryza sativa
MSMPGDAQPEGSHQSASSAKPALSSCRRNKSENTSFVSDLRDHIQEFIHASPNEHRTCFTKTIKRMFGMSKVVAERSTEAKEPGAESVLPLQTTVSR

SEQ ID NO: 516 - DNA, 159 bp, Persea americana
atgatgattgatgagattgacagctttgatcatgcatcaatggatcaaaacacaatggggcaaattggatggatgtgctatacagtttttgcaagtataccgttcgatgacaggttcaaggttggaaatgcttcacaaggtttccaggggtgcatctag

SEQ ID NO: 517 - protein, 52 aa, Persea americana
MMIDEIDSFDHASMDQNTMGQIGWMCYTVFASIPFDDRFKVGNASQGFQGCI

SEQ ID NO: 518 - DNA, 309 bp, Prunus armeniaca
atccagcctcacatttctccgaacacatggcagccactctctcggtccggcccaaccgcctctccgccggttcatccttccctcggccaccggttcgacggccagttccggcccgcctccgaaaacccgacgtgcaattcgagccctggagaggctctatcgtcccctccaaccgcacattagcctgggccgccactcttgtccaagccggctccagagccgatgactcggcgccgttcgagatgtcggtggagaacgccctgaagctcctcggcgtatcagacggcgcgtcgttcgatgaaattcttc

SEQ ID NO: 519 - protein, 102 aa, Prunus armeniaca
MLLYLKYRETTNCKKIINSLTTAAGEWMPRNGTMSTCRKFSTAEPTTAPATSPPMVMIVAFPNLIFFLVMKYKEAPKLPARISPGTSAPPYGPTEELEAPLT

SEQ ID NO: 520 - DNA, 615 bp, Petunia axillaris
atgagtacttctaatgcatcaacatcaggagtaaggaaaggtgcatggaccgaggaagaagatcttttattgagagaatgcattgagaagtatggagaagggaagtggcatctagttccggttagagctggtctgaatagatgcaggaaaagttgcagacttaggaggttgaattatctaaggccacatataaaaagaggggacttctctttggatgaagtagagcttattttgaggcttcataagcttctaggcaacaaatggtcactcatagctggtagacttccgggaagaactgcaaacaatgtcaaaaactattggaacacgcaccttcgaaagaagttaattgctcctcatgatcagaaacaagagagcaagagcaaagccatgaaaattaccgagaacaacataataaaacctcgtcctcggaccttctcaaggccggcaatgaatcatgtttcttgttggaacggcaaaagttgtaataaaaacactatagacaagaatgaaggtgacacagaaataataaagtttactgatgagaagcaaaaaccggaagaatcgatagatgatggaacttcaatggtgagccaatttattagccaacaacattga

SEQ ID NO: 521 - protein, 204 aa, Petunia axillaris
MSTSNASTSGVRKGAWTEEEDLLLRECIEKYGEGKWHLVPVRAGLNRCRKSCRLRRLNYLRPHIKRGDFSLDEVELILRLHKLLGNKWSLIAGRLPGRTANNVKNYWNTHLRKKLIAPHDQKQESKSKAMKITENNIIKPRPRTFSRPAMNHVSCWNGKSCNKNTIDKNEGDTEIIKFTDEKQKPEESIDDGTSMVSQFISQQH

SEQ ID NO: 522 - DNA, 447 bp, Populus x canadensis
acttggcagaggcaaaatttcgatggctctgcttctcttaacatcttctttttgcgtagagattatcactgccatagataccatcacatcaacgcaattcctgaaggatccagaggctatagtctctaatggaagtatatacactctgggatttttcagcccagttaattccaccgatcgatatgtaggaatttggtttaatgaagttcctgtagtgacagccatatgggtagctaatagaaacaaacctctaaatgactcatctgggattctggccatatccaaagatgggaatcttgtagttttgaataggcagcaagagattctttggtcaagtaatgtgtcgaattttgtttcaaactcaagtgcacagctctccgacacaggaaaccttgttttgcgagataacaacaacgaagaaatcatgtgggagagcttccaacatcc

SEQ ID NO: 523 - protein, 148 aa, Populus x canadensis
MISSLLLSRKTRFPVSESCALEFETKFDTLLDQRISCCLFKTTRFPSLDMARIPDESFRGLFLLATHMAVTTGTSLNQIPTYRSVELTGLKNPRVYILPLETIASGSFRNCVDVMVSMAVIISTQKEDVKRSRAIEILPLPSPIISNR

SEQ ID NO: 524 - DNA, 165 bp, Prunus cerasus
cccctggtgtggcacccccattcttgtgaccagcccagttggtgaaacagtgtctcagttgataagtgaggccatatttggtatggaggaggcggttaggtgttgccatgattgcttatctgcactttcgacagctgcttctgcagggattcgccatggagacat

SEQ ID NO: 525 - protein, 54 aa, Prunus cerasus
MKVHCRAVPIFKYSTSPTDKNKIRLPHSRSDTNHVLWPDVSMANPCRSSCRKCR

SEQ ID NO: 526 - DNA, 276 bp, Phaseolus coccineus
atggatactacgaaagggaacactgaaaaaccgtcttcattagctgcaagtgttacttcatgtcgaaagaagaagagtgaagaagccacttttttggaggacgtgaaagatcacattgacgagtttattcatgcttctatggatgaacataaaacttgcttcaagaaaacagttcagaagatgtttggtatgtccaaggctgttgcagaaaggaacactgacactgccaaagaagttgagagttctctgcctcttcagacaactttgcaaggttaa

SEQ ID NO: 527 - protein, 91 aa, Phaseolus coccineus
MDTTKGNTEKPSSLAASVTSCRKKKSEEATFLEDVKDHIDEFIHASMDEHKTCFKKTVQKMFGMSKAVAERNTDTAKEVESSLPLQTTLQG

SEQ ID NO: 528 - DNA, 399 bp, Prunus dulcis
  misc_feature (239)..(239): n is a, c, g, or t
atgggtgtcaagaagaaaattggcaccatgcttccttatgttcgttgtccattccggaggtcaatcaacaaaggacttgggtctgggagatatcttctagaaagcaatgatttttttgcactgagagacctcattgatctttcaaaaggagcctttgcagtgctccctgtgatagttgacactgtctcaaggaaaattctgggccatataactgagcagtgtctcatatgctgtgatgngggagtcccctgtggtgcacgacaagcatgcaatgacccttcatctctcattttcccttttcaagaagatgagattgaaaggtgtccatcttgtgaatcactattccacaagcattgcttcaaaaagctcatggactgcatgtgcggggcacatccttag

SEQ ID NO: 529 - protein, 132 aa, Prunus dulcis
  misc_feature (80)..(80): Xaa can be any naturally occurring amino acid
MGVKKKIGTMLPYVRCPFRRSINKGLGSGRYLLESNDFFALRDLIDLSKGAFAVLPVIVDTVSRKILGHITEQCLICCDXGVPCGARQACNDPSSLIFPFQEDEIERCPSCESLFHKHCFKKLMDCMCGAHP

SEQ ID NO: 530 - DNA, 282 bp, Prunus dulcis
atggaatcacagaaaagtcaacatgaacaacagccatcgcctgctgctgcaaccccctccaccacttcgtgtcgaaagaagaagagcgaacaagccagtttcttggaggatgtgaaggatcatattgatgactttatccatgcctctatggatgaacacaaaacttgcttcaagaagaccatgcagaagatgtttggcatgtcaaagattgtcgctgaaaggagttccaacaccaaggaagttgaaagttctctgccccttcaaaccacagtggcaaaatag

SEQ ID NO: 531 - protein, 93 aa, Prunus dulcis
MESQKSQHEQQPSPAAATPSTTSCRKKKSEQASFLEDVKDHIDDFIHASMDEHKTCFKKTMQKMFGMSKIVAERSSNTKEVESSLPLQTTVAK

SEQ ID NO: 532 - DNA, 252 bp, Phalaenopsis equestris
atggaatcaccaaaatcgggatcggattcagagtcgccgtgctggaaaaagaaatcggcggaggaagggctgctcgccggtgtgaaggatcacgtcgatcaattcgttcatacctcagtggagcagcatcggatctgcctcaagaagaccatcagcggcctttccgagttcgtcaaacgccgcaaatcacggactattaatcgatcgtcggtgatgaacgagacgaggattgaaccgccggttgaattctag

SEQ ID NO: 533 - protein, 83 aa, Phalaenopsis equestris
MESPKSGSDSESPCWKKKSAEEGLLAGVKDHVDQFVHTSVEQHRICLKKTISGLSEFVKRRKSRTINRSSVMNETRIEPPVEF

SEQ ID NO: 534 - DNA, 282 bp, Populus euphratica
atggaaacacaaaaaagtcaaccagcaaaacagcagtcatctgcagccctggatccggccatcacttcatgccgaaggaagaagaaggatgatgccacttttttggaggatctgaacgatcacatcgatgagttcattcatgcatctatggatgagcacaaggattgttttacgaagactatcaacaagatgtttggaatgtcaaagattgttgcagagaggagtggtgatgctaaggaagtcgaaagttctttgcctctccaaactacagtggcaaagtag

SEQ ID NO: 535 - protein, 93 aa, Populus euphratica
METQKSQPAKQQSSAALDPAITSCRRKKKDDATFLEDLNDHIDEFIHASMDEHKDCFTKTINKMFGMSKIVAERSGDAKEVESSLPLQTTVAK

SEQ ID NO: 536 - DNA, 228 bp, Panax ginseng
tcagtagtgaataagttcccaagaagattgaagacgaagataaggtcgtctgtggccgaagaacaacaaaccctaattccaactgaagatgggactgaagaagcacaagcatcttcggccacagagcagcccgtttctgttcccgtctctccttccgattttctcaccatgctctttcaggctgaaggaaccatgactgaaacagctgttcctacagttaccaaggct

SEQ ID NO: 537 - protein, 75 aa, Panax ginseng
MVRKSEGETGTETGCSVAEDACASSVPSSVGIRVCCSSATDDLIFVFNLLGNLFTTETLEILELEMVTWLCNRTN

SEQ ID NO: 538 - DNA, 240 bp, Panax ginseng
gtttcagtagtgaataagttcccaagaagattgaagacgaagataaggtcgtctgtggccgaagaacaacaaaccctaattccaactgaagatgggactgaagaagcacaaacatcttcggccacagagcagccagtttctgttcccgtctctccttccgatgttctcaccatgctctttcaggctgaaggaaccatgactgaaacagctgttcctacagttaccaaggctttagaggaa

SEQ ID NO: 539 - protein, 79 aa, Panax ginseng
MVRTSEGETGTETGCSVAEDVCASSVPSSVGIRVCCSSATDDLIFVFNLLGNLFTTETLEILELEMVTWLCNRTNWSGR

SEQ ID NO: 540 - DNA, 405 bp, Picea glauca
atgctgacccccaagaggaggggctggcctggatggtctcccaagacgccttctcctcctcctccagccgaagagatggcgggttcgagtcacgtcgtgacgcccactgccacagcaggaggcagcagcggaggtagggctttagtggaggctccaccgcggaatttattggacaataatggcgaaatcgtggccgcgcgcggcgaccccgagatctggaggcgtttcagggaggccggatctctggacgaggaatccctcgagaaaaaagatcgggccgctttagtcgtgcacgttaccaaactcgaagccgagatgtttggaatgtcaaaaatcgttgcggagaaaaatgcaagccctgagacagtagagagtgtcctccatcttcgaacaacgacatcctga

SEQ ID NO: 541 - protein, 134 aa, Picea glauca
MLTPKRRGWPGWSPKTPSPPPPAEEMAGSSHVVTPTATAGGSSGGRALVEAPPRNLLDNNGEIVAARGDPEIWRRFREAGSLDEESLEKKDRAALVVHVTKLEAEMFGMSKIVAEKNASPETVESVLHLRTTTS

SEQ ID NO: 542 - DNA, 195 bp, Pennisetum glaucum
ttaaaatgtactcatgtggccatatatagagtagaatgccatgaacacttgaagtggagaagcaattgatcagtagaataactggtgaaggtttatgaagcttttgtatactccatgcaaagatcttaaacgttctttaatttttcgtagcaacaagtgtagcatggatgcaattagcctccttcggttacttcc

SEQ ID NO: 543 - protein, 64 aa, Pennisetum glaucum
MTICPVESALPTVAWHANLHVFGFLLSNSFSFTVLGESISLPSTTSTMQVPKTPPPEQLRRNLS

SEQ ID NO: 544 - DNA, 381 bp, Petunia hybrida
  misc_feature (236)..(236): n is a, c, g, or t
atgaaaattaccgagaacaacataataaaacctcgtcctcggaccttctcaaggccggcaatgaatcatgtttcttgttggaacggcaaaagttgtaataaaaacactatagacaagaatgaaggtgacacagaaataataaaatttactgatgagaagcaaaaaccggaagaatcgatagatgatggacttcaatggtgggccaatttattagccaacaacattgagattaaggncttagctaatggtaattcaccaacattgttgcatgaagaaatagcaccattggtaaatattgagagcaacctcatgcaggaaggagaaagtggcctaagtgacttttcagttgatattgatggcatatgggatttacttagttaa

SEQ ID NO: 545 - protein, 126 aa, Petunia hybrida
  misc_feature (79)..(79): Xaa can be any naturally occurring amino acid
MKITENNIIKPRPRTFSRPAMNHVSCWNGKSCNKNTIDKNEGDTEIIKFTDEKQKPEESIDDGLQWWANLLANNIEIKXLANGNSPTLLHEEIAPLVNIESNLMQEGESGLSDFSVDIDGIWDLLS

SEQ ID NO: 546 - DNA, 198 bp, Pseudotsuga menziesii
atgcctcatttgttagctgacttgatggatcacattgatgagtttgttcatgcctccatggatgaacacaaaacatgctttgaaaagacaattaaaaagatgtttggaatgtcgaaaattgttgcagagaaaaatgcaagccctgaaccagtagagagtgtccttcatcttcgaacaacaacatcaaactcattataa

SEQ ID NO: 547 - protein, 65 aa, Pseudotsuga menziesii
MPHLLADLMDHIDEFVHASMDEHKTCFEKTIKKMFGMSKIVAEKNASPEPVESVLHLRTTTSNSL

SEQ ID NO: 548 - DNA, 294 bp, Physcomitrella patens
atgagccaggcggaggagccgaagccgcagcagagcgtgaaatctgagcaagcggcgccgcaggcatcgacttcatgccgcaagaagaagtcggagaattcgaccttctttggagacgtccttgaccatatcgatgaatttgtgcatgcgtcgtacgatgagcacaagacttgcttggagaaaacgcttcacaagatgtttggtatgtcgaaggcggtgtctaacgaagcacgacctacaagtgcgacgaatcccgtggaaaacgtgatgtctagacccgcgactactgactag

SEQ ID NO: 549 - protein, 97 aa, Physcomitrella patens
MSQAEEPKPQQSVKSEQAAPQASTSCRKKKSENSTFFGDVLDHIDEFVHASYDEHKTCLEKTLHKMFGMSKAVSNEARPTSATNPVENVMSRPATTD

SEQ ID NO: 550 - DNA, 498 bp, Pinus pinaster
atggcggaggtcgaggcacaagagcccactagccaggagaaagaggagccacaacagaaggaagaagtagcaggtgaaagtgaacagaagacagaagaggttattggtgaagtaattgctattgaggaacaaacaaaagaagtgcctgaagtggatgaaactactgccaaggtagaagctactacagaggcagaagttcccgcagaggaagaaacagctgtagaagaagaaactggagaagaggaaactgcagaggagccaaaagtcaagattgaggacttaaagactgcaccggcagacttccgttttcccacaactaatcaaactaggcactgctttactcgctatattgagtatcacaaatgcatagctgcaaaaggtgaaggagcaactgaatgtgagaagtttgccaggcattatcgttcactttgtcctggtgaatggattgaaagatggaatgagcagagggaaaatggaacttttcctggacctctgtaa

SEQ ID NO: 551 - protein, 165 aa, Pinus pinaster
MAEVEAQEPTSQEKEEPQQKEEVAGESEQKTEEVIGEVIAIEEQTKEVPEVDETTAKVEATTEAEVPAEEETAVEEETGEEETAEEPKVKIEDLKTAPADFRFPTTNQTRHCFTRYIEYHKCIAAKGEGATECEKFARHYRSLCPGEWIERWNEQRENGTFPGPL

SEQ ID NO: 552 - DNA, 279 bp, Picea sitchensis
cgtgggatacagacatggcacacccgggggcgtgtcctgttacttggtgtttgacatttattattgcccagttgtttaatggctgtgacatcggctgcctaacttgtgctacctcttttattataaaataggctgctaatttccaattaaatataaaaacaagagaacacaataatgtcaccaaattgtctttcataccaattcaattagaccaaatatcctctatacatcccatttgaaacttattaacgagggtccaaacatgtctttcacatacta

SEQ ID NO: 553 - protein, 92 aa, Picea sitchensis
MDKASHIDSASEKKSSTTPEMRSCRKKKSDDASFVADLMDHIDEFVHASMDEHKTCFEKTIKKMFGMSKIVAEKNASPETVESVLHLRTTTS

SEQ ID NO: 554 - DNA, 282 bp, Pinus taeda
atggataaaacaccccaaaaagattctgcttcagaaaagagattatcatctacaaccccagaaatgaggtcatgcagaaagaagaaatcagaggatgcctcatttgtagctgacttgatggatcacattgatgagtttgttcatgcctctatggatgagcacaaaacatgctttgaaaagacaattaaaaagatgtttggaatgtcaaaaatcgttgcagagaaaaatgcaagcactgagacagtagagagtgtcctcccgcttcgaacaacaacgtcctga

SEQ ID NO: 555 - protein, 93 aa, Pinus taeda
MDKTPQKDSASEKRLSSTTPEMRSCRKKKSEDASFVADLMDHIDEFVHASMDEHKTCFEKTIKKMFGMSKIVAEKNASTETVESVLPLRTTTS

SEQ ID NO: 556 - DNA, 207 bp, Puccinellia tenuiflora
tataagtttcggttttgtctaggtgctcctggattacaaggtgtcgtaattaacagtataacaggtaaaaaaggtagagcaaagaaaaatggtgcagatcgagaagaagctgcctagactggacagacctgggtaggtttcgagctatgtacacacacaccaccgtcggttccatgatcggttgcatgcatcttcttcacgggattc

SEQ ID NO: 557 - protein, 68 aa, Puccinellia tenuiflora
MQARSCYHATINKLENHLVIRSDQIRSDQNSEHGHCRSNPVKKMHATDHGTDGGVCVHSSKPTQVCPV

SEQ ID NO: 558 - DNA, 381 bp, Populus tremula
atgctggcaacagaagtcactgtattgtggaggtattcctatgaatctgcatctagcatccccaagaacccactttactttacagagagatatttggatgtgaaaaaatctttggccaacactttctttggtcctcttaaggaaggcgtatacagtgcatctgttcaaaggactctttttctaatggcaaaggctgtactcaacagatttcctgacatatcatccatccaactaaaaatgccaaatatccatttcctaccggtcaacatatcaagcaaggaaaacaccattgtgaagttcaatgatgatgtttttctaccgaccgacgagccacatggttcaatagaagcaagcttgagccgcttctggtcaaagatgtag

SEQ ID NO: 559 - protein, 126 aa, Populus tremula
MLATEVTVLWRYSYESASSIPKNPLYFTERYLDVKKSLANTFFGPLKEGVYSASVQRTLFLMAKAVLNRFPDISSIQLKMPNIHFLPVNISSKENTIVKFNDDVFLPTDEPHGSIEASLSRFWSKM

SEQ ID NO: 560 - DNA, 237 bp, Populus tremula
atgatgccaattttattggtggatgtgaaggatcacattgatgagttcatccatgacatctatggatgagacaaaaggattgtttcaagaagactatcaagaagatgtttggaatgtcgaagattgttagctgagaggagtgctgatgctaaggaagtcgagagtgctcttccatctccgaaccacagtggcagagtagaatgtcttcacccgtgttctaatgggctcataatgcta

SEQ ID NO: 561 - protein, 78 aa, Populus tremula
MMPILLVDVKDHIDEFIHDIYGDKRIVSRRLSRRCLECRRLLAERSADAKEVESALPSPNHSGRVECLHPCSNGLIML

SEQ ID NO: 562 - DNA, 267 bp, Populus tremula
atggagacacagaaaactcaaccagaaaaacagcaatcacctgctgtcacctcatgccgacagaaaaagaaggatgatgccacttttttggtggatgtgaaggatcacattgatgagttcatccatgcatctatggatgagcacaaggattgtttcaagaagactatcaagaagatgtttggaatgtcgaagattgttgctgagaggagtgctgatgctaaggaagtcgagagtgctcttcctctccgaaccacagtggcagagtag

SEQ ID NO: 563 - protein, 88 aa, Populus tremula
METQKTQPEKQQSPAVTSCRQKKKDDATFLVDVKDHIDEFIHASMDEHKDCFKKTIKKMFGMSKIVAERSADAKEVESALPLRTTVAE

SEQ ID NO: 564 - DNA, 678 bp, Populus trichocarpa
atgtctgcttctacttcaactactcaactctttcaagattttcttggggacttctactcaagaagattgctattacataaccctctttaccaatcaacaaacacggcaactcctccagctcctggaaacagtgcgccatctgaaccttccactggcactggcagcagctttgatgcgaatgttgttatggtcctttcagttctgttgtgtgcactgatttgctcactggggctcaattccatcattaggtgtgcattaaggtgctctaacatagcagcttcagaatctgctgcgaacccctcgactcagtcagcaaacactggagtgaatcgaagagcattaaagtctttcccagtggtaaattactcaagtgacttgaacctgcctggccttgacacagagtgtgtaatatgcctctcagagttcactcctggtgagcgtgtgcggcttcttcctaagtgccaccatggattccatgtcaaatgcattgataagtggcttagctcccactcatcctgccctacatgcaggcactgcctgatagagacatgtcaaaaaattattggttgtagccaggctagcacatcaggaacctctctaccagtacaagaaaccattgtgagcatattgcccctagaacctgaaggtttgatacgagattacagggaaaatagctaa

SEQ ID NO: 565 - protein, 225 aa, Populus trichocarpa
MSASTSTTQLFQDFLGDFYSRRLLLHNPLYQSTNTATPPAPGNSAPSEPSTGTGSSFDANVVMVLSVLLCALICSLGLNSIIRCALRCSNIAASESAANPSTQSANTGVNRRALKSFPVVNYSSDLNLPGLDTECVICLSEFTPGERVRLLPKCHHGFHVKCIDKWLSSHSSCPTCRHCLIETCQKIIGCSQASTSGTSLPVQETIVSILPLEPEGLIRDYRENS

SEQ ID NO: 566 - DNA, 267 bp, Populus trichocarpa
atggagacacagaaaactcaaccagaaaaacagcaatcacctgctgtcacctcatgtcgacggaaaaagaaggatgatgccacttttttggtggatgtgaaggatcacattgatgagttcatccatgcatctatggatgagcacaaggattgtttcaagaagactatcaagaagatgtttggaatgtcgaagattgttgctgagaggagtgctgatgctaaggaagtcgagagtgctcttcctctccgaaccacagtggcagagtag

SEQ ID NO: 567 - protein, 88 aa, Populus trichocarpa
METQKTQPEKQQSPAVTSCRRKKKDDATFLVDVKDHIDEFIHASMDEHKDCFKKTIKKMFGMSKIVAERSADAKEVESALPLRTTVAE

SEQ ID NO: 568 - DNA, 282 bp, Populus trichocarpa
atggaaacacaaaaaagtcaaccagcaaaacagcagtcacctgcagccctggatccggccatcacttcatgccgaaggaagaagaaggatgatgccacttttttggaggatctgaaggatcacatcgatgagttcattcatgcatctatggatgagcacaaggattgttttacgaagactatcaagaagatgtttggaatgtcaaagattgttgcagagaggagtggtgatgctaaggaagtcgaaagttctttgcctctccaaactacagtggcaaagtag

SEQ ID NO: 569 - protein, 93 aa, Populus trichocarpa
METQKSQPAKQQSPAALDPAITSCRRKKKDDATFLEDLKDHIDEFIHASMDEHKDCFTKTIKKMFGMSKIVAERSGDAKEVESSLPLQTTVAK

SEQ ID NO: 570 - DNA, 645 bp, Phaeodactylum tricornutum
atgttccgtcccacgaagcggcaaagactggaagccccgccctcatggttggataacgaggctctcaattctgtagcgtcaccctttgcggcccagccgacgctgaagactgctattgtatcccaattcactaaagagctcttcctggaacgattccagaaagagattcgtgaccgtttctgcttttcactgtcgtcccagctgttggttgaccctgggtcgaaccgcccattatatgatatcgagctgtggcgtggtatcctgaaggggcggattgcgtttggggataacgccgtgacgcggatcttggaggcagcttcgtaccaagagactcaggctccccaactcatagtcatggcgacagatttacaaccaccaacgcagcttgcgcatattccaatcctatgtcgtcagcttgccacctgtcgacatgtgcacattcctctcatgcttcttccgggaccgtcttcgctggaactagggaagcttttgggaacacgtagggtttctgtcttggcatttatgccgcgctacaaaggaaatgattccatggacttggaggagcgacgggatcatgcggatgcctacgtccacgacgcagttgactcgttcgtagcgtttattagctcaaagaaagcgccataa

SEQ ID NO: 571 - protein, 214 aa, Phaeodactylum tricornutum
MFRPTKRQRLEAPPSWLDNEALNSVASPFAAQPTLKTAIVSQFTKELFLERFQKEIRDRFCFSLSSQLLVDPGSNRPLYDIELWRGILKGRIAFGDNAVTRILEAASYQETQAPQLIVMATDLQPPTQLAHIPILCRQLATCRHVHIPLMLLPGPSSLELGKLLGTRRVSVLAFMPRYKGNDSMDLEERRDHADAYVHDAVDSFVAFISSKKAP

SEQ ID NO: 572 - DNA, 546 bp, Phaeodactylum tricornutum
atggcgctgcacgccgcaacatacaagaatagttcggttcacggaatcctattgggaagctcgacgaaaggcgtgattgtggtggaagatgctgttcctgtatcgcacggggctccgaccaagcctctggttgaaattagcttgggtctggtgcaagccaaaagcgatcacaccatagttggatggtacactgcgccggagctattttccgatagccgacccggaccagtcgccctgcgtatgacagccaacttggctactggtacaattgaaccgactttgattgtgttgcaaaatggacctttgtcgaaatgtcttggaggagaaggtaaagcagatggtgttttgcaagcttttggaaaagactttggtcaacagtatcttgaatcggttgaaactgctgtacaggatgggccaaaagctagccgagcggtgcaggaagctttcaaggatagcacaaaactagaggatctagaggatcacttgaaagggccgcaacatgcttcctggtatcccagctccgcactatctaacctgtcactatga

SEQ ID NO: 573 - protein, 181 aa, Phaeodactylum tricornutum
MALHAATYKNSSVHGILLGSSTKGVIVVEDAVPVSHGAPTKPLVEISLGLVQAKSDHTIVGWYTAPELFSDSRPGPVALRMTANLATGTIEPTLIVLQNGPLSKCLGGEGKADGVLQAFGKDFGQQYLESVETAVQDGPKASRAVQEAFKDSTKLEDLEDHLKGPQHASWYPSSALSNLSL

SEQ ID NO: 574 - DNA, 381 bp, Phaeodactylum tricornutum
gaagcggcagcagtcgaaccttgcccctttatgattatcattgacggaggttccaccggaagtcgtttgcacgtctttgaattcgtctaccaaatcccaaagcgggtggatactgaatcacagtatgcggagtcggaaccggaacgacgacttgttttggaacgccggggatcggcacgggcggacgtgcccttgtcggcctttggaccgacaagggaacagcccctggtcaaagcaactcacgtcgccgcacacttgctgcccgcctttgtgcaagccgcacgcattattccgccacgctaccacgccactactactgtcaagtatcaagcaaccgccggtatgcggctcttgtccgaccgcgaccaacaactagtttac

SEQ ID NO: 575 - protein, 126 aa, Phaeodactylum tricornutum
MLLLLLLSQNQSHTEGPFHFRPVHEERKSDISGLWRKAESVTEQRYHIHCFETPVRKYFGTCKCVRIVLDLDQIVVPRATAQTFQRVEKFLNAWCRPRFVQCLMSLRVIARKLAETVERKEKQTHS

SEQ ID NO: 576 - DNA, 444 bp, Poncirus trifoliata
atgggacctagtgggagtggtaaaacttctttgttaagggctatggctggtctttggagtgatggaagaggaaaaattacattctatgtgaaagacagggaagaaactgacgcacatacttcagatgtggactctcttgaagtaaattctcaaaatatgaatggggagcttacaagatccatgaatagaaactcaagaggagtattttttcttcctcagagaccatatatggttttaggtagtcttcgtcaacaattgctttatcctacgtggactgaagaagtgaaaccggcgtctgatgctgcaaaatccgctggtatgcatttacattattttaaaaacacttgcaacaagacctttaaaataagttggcaaatggagtggctaattgcagttggaagagtggctttagctgaaggacctttggcagtaaatttattataa

SEQ ID NO: 577 - protein, 147 aa, Poncirus trifoliata
MGPSGSGKTSLLRAMAGLWSDGRGKITFYVKDREETDAHTSDVDSLEVNSQNMNGELTRSMNRNSRGVFFLPQRPYMVLGSLRQQLLYPTWTEEVKPASDAAKSAGMHLHYFKNTCNKTFKISWQMEWLIAVGRVALAEGPLAVNLL

SEQ ID NO: 578 - DNA, 330 bp, Panicum virgatum
atgatgctcacaccactacttcgaacagctagcaagatataatacgatactagtttctgacgagaccaaaaaagtcccaagttttcgccaccgtagaacatgcccaagatcatttattacattggctgtttccccaaaaaagacgaccggccccttcagcgaggctcaactgctgccggcttggccccctcctgagtctcatccttgaccacgggctcgaccttctgcttgccgaacaccgagctgcacttctgggagaagtagttcttgaggcagatccagtgcttctgcgcgggcatcgccttgaactggttgaagtagtccttggcg

SEQ ID NO: 579 - protein, 109 aa, Panicum virgatum
MEKAACVRKEAVAAPEEAPPTLTAPPTLMAPEKEPEKCYKKTMGEEATFLESAKDYFNQFKAMPAQKHWICLKNYFSQKCSSVFGKQKVEPVVKDETQEGAKPAAVEPR

SEQ ID NO: 580 - DNA, 231 bp, Panicum virgatum
atggattcaagcaatgcccaatctgaaggttcagccccatctgttccaaaaaaccctgccatggcttcatgcaggaagaagaaaactgatgatgctaccttcatcgaagatctgaaagaccacatcgatgagttcattcacgcctccctggatgagcacaagacctgctttaagaagactattcagaaggttgtctgcaccagtaaactgaaattgggttttctccaataa

SEQ ID NO: 581 - protein, 76 aa, Panicum virgatum
MDSSNAQSEGSAPSVPKNPAMASCRKKKTDDATFIEDLKDHIDEFIHASLDEHKTCFKKTIQKVVCTSKLKLGFLQ

SEQ ID NO: 582 - DNA, 291 bp, Panicum virgatum
atggattcaagcaatgttcaatccgaaggttcagccccatctgttccaaaaaacccggccatggcttcatgcaggaagaagaaaaccgatgatgctacgttccttgaagatctgaaagaccacatcgatgagtttgttcatgcctccatggatgagcacaagacctgctttaagaagacaattcagaagatgtttgggatgtcaaaggctgttgcagagcgatcagcagcgggggcaaaggaagctgaagttgaaagtgctctgcctcttcagaccagtgtctcgcagtag

SEQ ID NO: 583 - protein, 96 aa, Panicum virgatum
MDSSNVQSEGSAPSVPKNPAMASCRKKKTDDATFLEDLKDHIDEFVHASMDEHKTCFKKTIQKMFGMSKAVAERSAAGAKEAEVESALPLQTSVSQ

SEQ ID NO: 584 - DNA, 291 bp, Panicum virgatum
atggattcaagcaatgcccaatctgaaggttcagccccatctgttccaaaaaactctgccatggcttcatgcaggaagaagaaaactgatgatgctaccttcatcgaagatctgaaagaccacatcgatgagttcattcacgcctccatggatgagcacaagacctgctttaagaagactattcagaagatgtttgggatgtcaaaggttgttgcagagcgatcagccgcgggggcaaaggaagctgaagttgaaagtgctctgcctcttcagaccagtgtctcgcagtag

SEQ ID NO: 585 - protein, 96 aa, Panicum virgatum
MDSSNAQSEGSAPSVPKNSAMASCRKKKTDDATFIEDLKDHIDEFIHASMDEHKTCFKKTIQKMFGMSKVVAERSAAGAKEAEVESALPLQTSVSQ

SEQ ID NO: 586 - DNA, 345 bp, Panicum virgatum
atggagaaggcggcctgcgcgaggaaggaggcggtggcggtggcggtgccggaggaggcgacgccgaccctgaccgcgccgccgaccctgatggcgccggagaaggagcccgagacgcgggagaagtgctacaagaagacggtgggggaggaggcgacgttcctggagagcgccaaggactacttcaaccagttcaaggcgatgcccgcgcagaagcactggatctgcctcaagaactacttctcccagaagtgcagctcggtgttcggcaagccgaaggtcgagcccgtggtcaaggatgagactccggaggtggcgaagccagcagcagttgagtctcgctga

SEQ ID NO: 587 - protein, 114 aa, Panicum virgatum
MEKAACARKEAVAVAVPEEATPTLTAPPTLMAPEKEPETREKCYKKTVGEEATFLESAKDYFNQFKAMPAQKHWICLKNYFSQKCSSVFGKPKVEPVVKDETPEVAKPAAVESR

SEQ ID NO: 588 - DNA, 555 bp, Panicum virgatum
atggcagctgacaagtttctcaatctgaagtacttaaggattcatcttactggtttttctaaggctttttgcccagactatgactatctgtctttggtttcgtttctggatgcttcacctaccttggagactttcatcctgagtgtaaagcagaatgacatgaagcatgattcagtttttgggaatgccttgcatgtggggtcgattcctgcacacaagcatagcaggcttaggaaggtgcagatcattggcttctgctctgcaaagagcatggttgagctcacttgtcatattctcgagaatgcaacatcccttgaaagccttacattggacaccatatttgatcagtttgatcagggtacagtggttgagcatggcgattgtaggaggcgttgtgtccaaaaatacagtggatgcggtctgatttcaagggagatgatattggaagcacatgaagctctcagggttgtcagtatatacatcataggaagagtaccccctgcagttcagttaaatgttagggggccttgcagccagtgtcataaggtaccgtag

SEQ ID NO: 589 - protein, 184 aa, Panicum virgatum
MAADKFLNLKYLRIHLTGFSKAFCPDYDYLSLVSFLDASPTLETFILSVKQNDMKHDSVFGNALHVGSIPAHKHSRLRKVQIIGFCSAKSMVELTCHILENATSLESLTLDTIFDQFDQGTVVEHGDCRRRCVQKYSGCGLISREMILEAHEALRVVSIYIIGRVPPAVQLNVRGPCSQCHKVP

SEQ ID NO: 590 - DNA, 312 bp, Panicum virgatum
tactggatcgatgatgctcacaccactacttcgaacagctagcaagatataatacgatactagtttctgacgagaccaaaaaagtcccaagttttcgccaccgtagaacatgcccaagatcatttattacattggctgtttccccaaaaaagacgaccggccccttcagcgagactcaactgctgccggcttggccccctcctgagtctcatccttgaccacgggctcgaccttctgcttgccgaacaccgagctgcacttctgggagaagtagttcttgaggcagatccagtgcttctgcgcgggcatcgc

SEQ ID NO: 591 - protein, 103 aa, Panicum virgatum
MEKAACVRKEAVAAPEEAPPTLMAPEKEPEKCYKKTVGEEATFLESAKDYFNQFKAMPAQKHWICLKNYFSQKCSSVFGKQKVEPVVKDETQEGAKPAAVESR

SEQ ID NO: 592 - DNA, 294 bp, Panicum virgatum
atggattcaagcaatgctcaatctgaaggttcagccccatctgttccaaaaaaccctgccatggcttcatgccggaagaagaaaaccgatgatgatgctaccttcatcgaagatctgaaagaccatatcgatgagttcatttatgcctccatggatgaacacaagacctgctttaagaagacaattcagaagatgttcgggatgtcaaaggttgttgcagagcgatcagccacgggggcaacggaagctgaagttgaaagtgctctgcctcttcaaaccagtgtctcgcagtag

SEQ ID NO: 593 - protein, 97 aa, Panicum virgatum
MDSSNAQSEGSAPSVPKNPAMASCRKKKTDDDATFIEDLKDHIDEFIYASMDEHKTCFKKTIQKMFGMSKVVAERSATGATEAEVESALPLQTSVSQ

SEQ ID NO: 594 - DNA, 279 bp, Panicum virgatum
atgtctagtggcacccaatctgagggatcacaccaacctgcttcaaaacctgctgtgaattcatgccgaaagaatgtacctgggacttcattcgtctcagatttgagagatcacatccatgagttcattcatgcctctgctgatgaacaccggacatgcttcacaaagacaatgaagaagatgtttgggatgtcaaagattgtcgctgagaaatcctctaaagtagaggaggatggacctgaaagtgtgttaccacttcagaccacagtgtcacagtag

SEQ ID NO: 595 - protein, 92 aa, Panicum virgatum
MSSGTQSEGSHQPASKPAVNSCRKNVPGTSFVSDLRDHIHEFIHASADEHRTCFTKTMKKMFGMSKIVAEKSSKVEEDGPESVLPLQTTVSQ

SEQ ID NO: 596 - DNA, 276 bp, Phaseolus vulgaris
atggatactacaaaagggaacactgaaaaaccgtcttcattagctgcaagtgttacttcatgtcgaaagaagaagagtgaagaagccacttttttggaggacgtgaaagatcacattgacgagtttattcatgcttctatggatgaacataaatcttgcttcaagaaaactgttcagaagatgtttggtatgtccaaggctgttgcagaaaggaacactgacactgccaaagaagttgagagttctctgcctcttcagacaactttgcaaggttaa

SEQ ID NO: 597 - protein, 91 aa, Phaseolus vulgaris
MDTTKGNTEKPSSLAASVTSCRKKKSEEATFLEDVKDHIDEFIHASMDEHKSCFKKTVQKMFGMSKAVAERNTDTAKEVESSLPLQTTLQG

SEQ ID NO: 598 - DNA, 315 bp, Prototheca wickerhamii
  misc_feature (245)..(245): n is a, c, g, or t
atgcaaggcggcgctgcaagtgctggtcgcgctgggctccggcgcggcgctcgagggtcggctgcacctgtccccggctctcccgccctccttcctcgccggccagctggacatggcgaccgtcgcggctgtgggacacagttacggcggggccaccgtggcggccctggtgtcccaggacccgcgcttcgcctgcggcgtcgccctcgacccctggtggtttgcgatgccgccagagagcgcgngcaacacggcctggcagacgagcacgcccctcctcatccttggttccaacacctggaacgtgctgaatga

SEQ ID NO: 599 - protein, 104 aa, Prototheca wickerhamii
  misc_feature (82)..(82): Xaa can be any naturally occurring amino acid
MQGGAASAGRAGLRRGARGSAAPVPGSPALLPRRPAGHGDRRGCGTQLRRGHRGGPGVPGPALRLRRRPRPLVVCDAARERXQHGLADEHAPPHPWFQHLERAE

SEQ ID NO: 600 - DNA, 234 bp, Plumbago zeylanica
atggcagagattgatctgaaaactgcacccgctgactttcgatttcccacaactaaccaaacaaggcactgcttcacccgctacatagagttccacaggtgcattagagtgaaaggtgaagagtcaaatgaatgtgcaaagtttgcgaaatactatcgctccctttgtcctggtgaatgggttgagcgctggaatgagcagagggagaacggtacatttgctgggcctctttga

SEQ ID NO: 601 - protein, 77 aa, Plumbago zeylanica
MAEIDLKTAPADFRFPTTNQTRHCFTRYIEFHRCIRVKGEESNECAKFAKYYRSLCPGEWVERWNEQRENGTFAGPL

SEQ ID NO: 602 - DNA, 297 bp, Rosa chinensis
aagtcgaagacagctcgtctgagaaacttgggagaagcaaaaacctgctaaaggaagccagcttgactcgaacaagaaagcaatgacaatccagtgcaaggtatgcatgcaggctttcatctgcaccacaactgaggtcaagtgcagggaacatgcagaggcaaagcatcccaaatctgatgtttatgcatgttttccacatcttcaaaagtgaaataattcaatcccgagagggaaacaacatgtagctgaaatgtgtttaacatcacctcttgtaatcatactcggatgacctcc

SEQ ID NO: 603 - protein, 98 aa, Rosa chinensis
MWKTCINIRFGMLCLCMFPALDLSCGADESLHAYLALDCHCFLVRVKLASFSRFLLLPSFSDELSSTSDRCLHPFVLLLLFFEDFQLTREGSDTDLEF

SEQ ID NO: 604 - DNA, 471 bp, Rosa chinensis
  misc_feature (17)..(17): n is a, c, g, or t
  misc_feature (456)..(456): n is a, c, g, or t
atggcgcgcttcccatntgagttccttgagcatcttaagggttgtcacaaaggtgacaaggtcaagggcatcaatgacctgaagaagtaccttctaaagttcggttacttaaactacgagaaccacagacatttcaacgatgatgattttgacgagctcttggaggaagccgtcaagacttaccagctcaatttccacctcaagcccacgggaacattggacgacaaaaccgtatcaacgatgatgatgcctcgttgtggtgtgcccgatatcatcaatggcaccacatccatgagatcaacccagataaagcgccagcaccgtgcaattcataccaccgttcactactcatttcccgatggaaatctaaaatggccttcttcaaaataccatctgacttacggttttctcgccggcgccccatccgaagccccaggtgctgtcgcacagggcttnctcaacatgggctaa

SEQ ID NO: 605 - protein, 156 aa, Rosa chinensis
  misc_feature (6)..(6): Xaa can be any naturally occurring amino acid
  misc_feature (152)..(152): Xaa can be any naturally occurring amino acid
MARFPXEFLEHLKGCHKGDKVKGINDLKKYLLKFGYLNYENHRHFNDDDFDELLEEAVKTYQLNFHLKPTGTLDDKTVSTMMMPRCGVPDIINGTTSMRSTQIKRQHRAIHTTVHYSFPDGNLKWPSSKYHLTYGFLAGAPSEAPGAVAQGXLNMG

SEQ ID NO: 606 - DNA, 615 bp, Rosa chinensis
atggcaccaaaatctgatatttctcttttcaaagtcactcccctcctcctcctcgccctcttttctttcctctctaatgcagcggcaaactcatctccgcttgagttccttgagcatcttaagggttgtcaaaaaggtgacaaggtcaagggcatcaatgacctcaagaagtaccttcacaacttcggttacttgaactacaagaaccacattcattctgatgacgatgatttcgacgagctcttggaggaagccgtcaagacttaccagctcaatttccacctcaagtccaccggaacgttggacgacaaaaccatattacagatgatgatgcctcgttgtggcgtgcccgatatcgtcaatggcaccacatccatgcgagcagccaagataaagcaccagcacggttcaattcataccactgttcactactcatttcctaatggaaaaccaaaatggccttcctctaaataccatctgacatacgctttcttccccggcaccccatcccaagccacgggtgctatagcacaggctttcgcaacatgggctagaagcactcacttcaagttcagtcaggcccaaaattaccagaatgcagatgtcaagatttag

SEQ ID NO: 607 - protein, 204 aa, Rosa chinensis
MAPKSDISLFKVTPLLLLALFSFLSNAAANSSPLEFLEHLKGCQKGDKVKGINDLKKYLHNFGYLNYKNHIHSDDDDFDELLEEAVKTYQLNFHLKSTGTLDDKTILQMMMPRCGVPDIVNGTTSMRAAKIKHQHGSIHTTVHYSFPNGKPKWPSSKYHLTYAFFPGTPSQATGAIAQAFATWARSTHFKFSQAQNYQNADVKI

SEQ ID NO: 608 - DNA, 258 bp, Rosa hybrid cultivar
atgggaggaggcgagcatgctcacggcgagggtgcccacggcggagacttcagggcaaaggtgtggagcatgagcggtgggccctactgcaggcccaagcactggaagcgcaacacggctttcgccatgttcggagtcttcctcatctgcattcccatcgccatgaaatctgccgagctcgagcaacggccacatcaaccagttcgccccattccttcacaaatgtggtgcaagaactttggaaagaaagactactga

SEQ ID NO: 609 - protein, 85 aa, Rosa hybrid cultivar
MGGGEHAHGEGAHGGDFRAKVWSMSGGPYCRPKHWKRNTAFAMFGVFLICIPIAMKSAELEQRPHQPVRPIPSQMWCKNFGKKDY

SEQ ID NO: 610 - DNA, 234 bp, Spartina alterniflora
atgggagggcattgccctcaaaatgggaggacgctgagaggtggatcttcagcccaaattccaatgatggacttggaagagcctcggcagctcatgctcggcgaccaaaatctaaaagtggtcctctgggacctcctggaagacttggtggacaatattcatctgtttcttcatcagcgtcgatgcttgacagtgggagagttggacaattcacagcgaattctccttttgtag

SEQ ID NO: 611 - protein, 77 aa, Spartina alterniflora
MGGHCPQNGRTLRGGSSAQIPMMDLEEPRQLMLGDQNLKVVLWDLLEDLVDNIHLFLHQRRCLTVGELDNSQRILLL

SEQ ID NO: 612 - DNA, 291 bp, Spartina alterniflora
atggattcaggcagtactcaacctacaggttcagcggcctcgtctgttccaaaaaaccctgcaatgacatcgtgcaggaagaagaaatccgaggaggctacttttatcgaagatgtgagagaccacattgatgagttcattcatgcctccatggatgagcacaagacctgcttcaagaagaccattcagaagatgtttggcatgtcaaaggctgttggggagcgatccgcagaagcgaagggagctgaagttgaaagtgcattgccgcttcagactagtgtttcacagtag

SEQ ID NO: 613 - protein, 96 aa, Spartina alterniflora
MDSGSTQPTGSAASSVPKNPAMTSCRKKKSEEATFIEDVRDHIDEFIHASMDEHKTCFKKTIQKMFGMSKAVGERSAEAKGAEVESALPLQTSVSQ

SEQ ID NO: 614 - DNA, 363 bp, Sorghum bicolor
atggagaaggaagacggcgtgaagaaggtggcggtggtggcgccagaggaggcgacgccgaccctcaccgcgacaccgaccctcaccgcgccgctgccggcaccggagaaggagccggagatgcaggggaagtgctacaagaagacggtgggggaggaggcgacgttcctggagaccgccaaggactacttcaaccagtttaaggagatacccgcccagaagcactggatctgcctcaagaactacttcaaccagaagtgcggctcggtgttcggcaagcagaaggtcgagcctgtggtgaaggatgatgcaactccggaggtggtggcgaagccggcaactgcaccagtggaatctaactga

SEQ ID NO: 615 - protein, 120 aa, Sorghum bicolor
MEKEDGVKKVAVVAPEEATPTLTATPTLTAPLPAPEKEPEMQGKCYKKTVGEEATFLETAKDYFNQFKEIPAQKHWICLKNYFNQKCGSVFGKQKVEPVVKDDATPEVVAKPATAPVESN

SEQ ID NO: 616 - DNA, 291 bp, Sorghum bicolor
atggcttcaagcactagtcagacagaagctccagccccatctgtccccaaaaatcctgcaatggcatcatgccggaagaagaaaacagatgatgctaccttccttgaagatctgaaagaccacatcgatgagttcattcatgcctccatggatgagcacaagacctgctttacgaagacgatccaaaagatgtttgggatgtcaaaggctgttgcagagagatctgcggcagaagcaaaggaagctgaagttgaaagtgctttgccacttcagaccagcgtctctcagtag

SEQ ID NO: 617 - protein, 96 aa, Sorghum bicolor
MASSTSQTEAPAPSVPKNPAMASCRKKKTDDATFLEDLKDHIDEFIHASMDEHKTCFTKTIQKMFGMSKAVAERSAAEAKEAEVESALPLQTSVSQ

SEQ ID NO: 618 - DNA, 285 bp, Sorghum bicolor
atgacgatgtccgggcgcaccgaacctgaaggatcacatcaacttgattcaaaacgtgctgtgcattcatgccgaaaaaatgtacctggctcatcattcgtctcagatttgaaagatcacatccacgagttcatcaatgcttctgcagatgaacacaggacatgcttcacaaagactatcaagaagatgtttgggatgtcaaagactgtcgcacagagatcctctgaagcagaggaagctggtccagcaagtgtcttgccacttgagaccactgtgtcgcggtag

SEQ ID NO: 619 - protein, 94 aa, Sorghum bicolor
MTMSGRTEPEGSHQLDSKRAVHSCRKNVPGSSFVSDLKDHIHEFINASADEHRTCFTKTIKKMFGMSKTVAQRSSEAEEAGPASVLPLETTVSR

SEQ ID NO: 620 - DNA, 279 bp, Sorghum bicolor
atgtctggtcatacccaacctgaaggaccacaccaacttgattcaaaacgtgctgtgaactcatgccgaaagaatgtacccggcacatcattcgtatcagatttgagagatcacatccacgagttcatcaatgcctctgcagatgaacaccggacatgcttcacaaagactatcaagaggatgttccagatgtcaaagactgtcactgagagatcctctgaagctgaggaagctggatccgaaagtgtcttgccacttcagaccacagtgtcgcggtag

SEQ ID NO: 621 - protein, 92 aa, Sorghum bicolor
MSGHTQPEGPHQLDSKRAVNSCRKNVPGTSFVSDLRDHIHEFINASADEHRTCFTKTIKRMFQMSKTVTERSSEAEEAGSESVLPLQTTVSR

SEQ ID NO: 622 - DNA, 297 bp, Saruma henryi
atcttcagatttcttcctgcgacaagaggtcgagacaggcgttgtcgcagatgttgactgttgcgcattagaataattgttctgagactccatccttcttttgtttcctctcttcaaaaaaccctagaagcaaaaagaataagaaacaacgggtggcggaaataaagagccggctcctcctttcctcccgtctccttactattgctcgaaaatcggctccggcaaccggcggcgtaagcgtgatttctgtctggtcggtggcccgtggctgtgagattgcctgagaaagaagggact

SEQ ID NO: 623 - protein, 98 aa, Saruma henryi
MESQNNYSNAQQSTSATTPVSTSCRRKKSEDATFLEDIKDHIDEFINASMDEHKSCFKKTIQKMFGMSKVVSERAAANDGVESSLPLQTTVAGVNDRG

SEQ ID NO: 624 - DNA, 249 bp, Saccharum hybrid cultivar
atgaggctcatagcttcgacaccacctgcaagcaatcctcagctggccaacgtgctacctgtggtcattcctgatgtgcctgaaagtatataccgggccaataatgtgaacaagcatgttgatgtgggcctcaatgacaaagcatttggtatgtcttgtgttgctgctgtgtttggaagtgggattgcacaagctgaggatgaagttccaagcggagatgattcacaagagcagtttgcccgaatatga

SEQ ID NO: 625 - protein, 82 aa, Saccharum hybrid cultivar
MRLIASTPPASNPQLANVLPVVIPDVPESIYRANNVNKHVDVGLNDKAFGMSCVAAVFGSGIAQAEDEVPSGDDSQEQFARI

SEQ ID NO: 626 - DNA, 267 bp, Solanum lycopersicum
atgtcgacggaaaaaagtccgcttgagcaaacgtcaccggctgttgcatcatcatgccgaaaaaagaagtctgaaagtgccacatttttggaggatgtgaaggatcatattgatgagtttatacatgcctcaagggatgaacacgcatcttgctttaaaaaaaccatcaataaaatgtttgggatgtctaaaattgtcgctgaaaaaaatgctgaaccaaaggaggttgaaagctcacttcctctccaaactgttgtatctgagtaa

SEQ ID NO: 627 - protein, 88 aa, Solanum lycopersicum
MSTEKSPLEQTSPAVASSCRKKKSESATFLEDVKDHIDEFIHASRDEHASCFKKTINKMFGMSKIVAEKNAEPKEVESSLPLQTVVSE

SEQ ID NO: 628 - DNA, 282 bp, Solanum lycopersicum
atggcagcagaaaatgtccaaaatgagaagacatcatccgctgttactccaaatccagccatgacttcgtgtaggaagaagaagagcgaacaagcgacttttctagaagatatcaaggatcacatggatgaatttattcatgcttctatggatgaacacaaaacttgcttcaagaagaccattcaaaagatgtttggcatgtcaaaaattgttgcggaaaggaatgccgaggctaaagaggttgaaagttctctgcccctgcaaacaacattggctaagtag

SEQ ID NO: 629 - protein, 93 aa, Solanum lycopersicum
MAAENVQNEKTSSAVTPNPAMTSCRKKKSEQATFLEDIKDHMDEFIHASMDEHKTCFKKTIQKMFGMSKIVAERNAEAKEVESSLPLQTTLAK

SEQ ID NO: 630 - DNA, 357 bp, Saccharum officinarum
atggagaaggaagacggcgtgaagaaggtggcggtggcggcgcccgaggaggcgacgccgaccctgaccgcgacgccgaccctcaccgcgccgctgccggcaccggagaaggagccggagacgcggtgctacaagaagacggtgggggaggaggcgacgttcctggagaccgccaaggactacttcaaccagttcaaggagatacccgctcagaagcactggatctgcctcaagaactacttcaaccagaagtgcgcctcggtgttcggcaagcagaaggtcgagcctgtggtgaaggatgatgaaactccggaggtggtggcgaagccggcggcaacaacagttgaatctcactga

SEQ ID NO: 631 - protein, 118 aa, Saccharum officinarum
MEKEDGVKKVAVAAPEEATPTLTATPTLTAPLPAPEKEPETRCYKKTVGEEATFLETAKDYFNQFKEIPAQKHWICLKNYFNQKCASVFGKQKVEPVVKDDETPEVVAKPAATTVESH

SEQ ID NO: 632 - DNA, 279 bp, Saccharum officinarum
atgtctggtcatacccaacctgaaggaccacaccaacttgattcaaaacgcgctgtgaattcatgccgaaagaatgtacctggtacatcgttcgtctcagatttgagagatcacatccacgagttcatcaacgcctctgcagatgaacaccggacatgcttcacaaagactatcaagaggatgttcgagatgtcaaagattgtcactgagagatcctctgaagctgaggaagctggatccgaaagtgtcttgccacttcagaccacagtgtcgcggtag

SEQ ID NO: 633 - protein, 92 aa, Saccharum officinarum
MSGHTQPEGPHQLDSKRAVNSCRKNVPGTSFVSDLRDHIHEFINASADEHRTCFTKTIKRMFEMSKIVTERSSEAEEAGSESVLPLQTTVSR

SEQ ID NO: 634 - DNA, 312 bp, Saccharum officinarum
atggagaaggaagacggcgtgaagaaggtggcggtggcggcgctggaggaggtgacgccgaccgcgccgctgccagcaccggagaaggagccggagacgcaggagaagtgctacaagaagacggtgggggaggaggcgacgttcctggagaccgccaaggactacttcaaccagttcaaggagatacccgctcagaagcactggatctgcctcaagaactacttcaaccagaagtgcagctcggcaatgtcgcttgcgcccacccctctcctcttcttgatatcccattcgttctatgatgtgcgcgcatga

SEQ ID NO: 635 - protein, 103 aa, Saccharum officinarum
MEKEDGVKKVAVAALEEVTPTAPLPAPEKEPETQEKCYKKTVGEEATFLETAKDYFNQFKEIPAQKHWICLKNYFNQKCSSAMSLAPTPLLFLISHSFYDVRA

SEQ ID NO: 636 - DNA, 327 bp, Saccharum officinarum
aatttcaggcacagatagaggttcacattctaagaacttgaagcagaaacacagagggttcatgacgaattactggaccaaccattcccaaaccactaccacgacaactagcatgacatactatgatactagtttctggggagaccaaagaagtcttcaccaccgtagaacacccaaagattatttacattttgtttcctcgagacgatcagaacaccttcagtgagattaactgctgcaagacgaatagacgatcagaaccccttcagtgagattcaactgttgttgtcgccggcttcgccaccacctccggagtttcatcatcct

SEQ ID NO: 637 - protein, 108 aa, Saccharum officinarum
MEKEDGVKKVAVAAPETAPLPAPEKEPETQEKCYKKTVGEEATFLETAKDYFNQFKEIPAQKHWICLKNYFNQKCGSVFGKQKVEPVVKDDETPEVVAKPATTTVESH

SEQ ID NO: 638 - DNA, 336 bp, Saccharum officinarum
atggagaaggaagacggcgtgaagaaggtggcggtggcggcgcccgaggaggcgacgccgaccctgaccgcgacgctgccggcaccggagaaggagccggagacgcggtgctacaagaagacggtgggggaggaggcgacgttcctggagaccgccaaggactacttcaaccagttcaaggagatgcccgctcagaagcactggatctgtctcaagaactactttaaccagaagtgcgcctcggtgttcggcaagcagaaggtcgagcctgtggtgaaggatgatactccggaggtggtggcgaagccggcggcaacaacagttgaatctcactga

SEQ ID NO: 639 - protein, 111 aa, Saccharum officinarum
MEKEDGVKKVAVAAPEEATPTLTATLPAPEKEPETRCYKKTVGEEATFLETAKDYFNQFKEMPAQKHWICLKNYFNQKCASVFGKQKVEPVVKDDTPEVVAKPAATTVESH

SEQ ID NO: 640 - DNA, 210 bp, Suaeda salsa
ttgaggcaatggtagcagattttggactggcaaagttgtctgaagatgttaatactcatatatccacacgtgtgatgggaacctttggatacctggctcccgagtatgcttcaagtgggaaacttactgataaatctgatgtcttctcctttggagtcatgctcctggaattgattactgggcgacgacctgttgactcaacaaatgctt

SEQ ID NO: 641 - protein, 69 aa, Suaeda salsa
MSINIFRQLCQSKICYHCLKLVIQKNIGSFNIPMNDFRMTSSCKYANPLAVPRAILNLVGHSMVGCPLP

SEQ ID NO: 642 - DNA, 282 bp, Solanum tuberosum
atggcagcagaaaatgtccaaaatgagaaggcgccatcccctgttactccaaatccagctatgacttcatgtcggaagaagaagagcgaacaagcaaattttctagaagatatcaaggatcacatggatgaattcattcatgcttccatggatgaacacaaaacttgcttcaagaagaccattcaaaagatgtttggcatgtcaaaaattgttgcggaaaggaatgctgaggctaaagaggttgaaagttctcttcccctgcaaacaacattggctaagtag

SEQ ID NO: 643 - protein, 93 aa, Solanum tuberosum
MAAENVQNEKAPSPVTPNPAMTSCRKKKSEQANFLEDIKDHMDEFIHASMDEHKTCFKKTIQKMFGMSKIVAERNAEAKEVESSLPLQTTLAK

SEQ ID NO: 644 - DNA, 288 bp, Triticum aestivum
  misc_feature (99)..(99): n is a, c, g, or t
atggattccggtaatacccagacagacggttctcagccagctgctcctaagaaccctgccatgacgtcgtgccggaagaagaaaactgatgatgatgtnaccttccttgaagacgtgaaagaacacatcgacgagttcatccacgcgtccatggatgagcacaagacctgcttcaagaagaccattcagaagatgtttgggatgtcgaaggttgtcgcggaggtccgctgcagcaaaggaagtgaagtcgaaagcgctttgccccttcagaccagtgtgtcccagtag

SEQ ID NO: 645 - protein, 95 aa, Triticum aestivum
MDSGNTQTDGSQPAAPKNPAMTSCRKKKTDDDVTFLEDVKEHIDEFIHASMDEHKTCFKKTIQKMFGMSKVVAEVRCSKGSEVESALPLQTSVSQ

SEQ ID NO: 646 - DNA, 291 bp, Triticum aestivum
atggattccggtaatacgccgacagacggttctcagccagctgctcctaagaaccctgccatgacgtcgtgccggaagaagaaaactgatgatgatgttaccttccttgaagacgtgaaagaacacatcgacgagttcatccacgcgtccatggatgagcacaagacctgcttcaagaagaccattcagaagatgtttgggatgtcgaaggttgtcgcggagcggtccgctgccagcaaggaagctgaagtcgaaagcgctttgccccttcagaccagtgtgtcccagtag

SEQ ID NO: 647 - protein, 96 aa, Triticum aestivum
MDSGNTPTDGSQPAAPKNPAMTSCRKKKTDDDVTFLEDVKEHIDEFIHASMDEHKTCFKKTIQKMFGMSKVVAERSAASKEAEVESALPLQTSVSQ

SEQ ID NO: 648 - DNA, 291 bp, Triticum aestivum
atggattccagcactacacagtctgaaggttctcagccacctgttcctaaaaaccctgccatgacgtcgtgccggaagaagaaaactgatgatgatgttaccttccttgaagatgtgaaagaacacatcgacgagttcatccacgcgtccatggatgagcacaagacctgcttcaagaagaccattcagaagatgtttgggatgtcgaaggttgtcgcggagcggtccgctgcagcaaaggaagctgaagtcgaaagcgctttgccccttcagaccagtgtgtcccagtag

SEQ ID NO: 649 - protein, 96 aa, Triticum aestivum
MDSSTTQSEGSQPPVPKNPAMTSCRKKKTDDDVTFLEDVKEHIDEFIHASMDEHKTCFKKTIQKMFGMSKVVAERSAAAKEAEVESALPLQTSVSQ

SEQ ID NO: 650 - DNA, 348 bp, Triticum aestivum
atggagaggaaggagagcggggagaagatggagaaggtggaggtgggcgacggcgggaagaagccggaggaggggaccaagccggcgacggcgccggtgtgcttcaagaagccggcgggcgaggacaccggcatcctggagaccaccaaggactacttcaagcagctcaaggacaccagcgccgacacgcactgggactgcatcaagaaccgggtccgcgccgccggcgagtacatctccaacaagaccagctcggtgtttggcaggcagaaggtggagcctgaggccaaggaggagaccccgggggcgaagccagaagcagcaccggcgtcaggggagtctcagtga

SEQ ID NO: 651 - protein, 115 aa, Triticum aestivum
MERKESGEKMEKVEVGDGGKKPEEGTKPATAPVCFKKPAGEDTGILETTKDYFKQLKDTSADTHWDCIKNRVRAAGEYISNKTSSVFGRQKVEPEAKEETPGAKPEAAPASGESQ

SEQ ID NO: 652 - DNA, 342 bp, Triticum aestivum
atggagaggaaggagggcggggagaagatggaggaggtggaggtgggcgacggcgggaagaagccggaggaggggaccaagccggcgccggtgtgcttcaagaagccggcgggcgaggacaccggcatcctggagaccaccaaggactacttcaagcagctcgggaacaccagcgccgacacgcactgggactgcatcaagaacagggtccgcgccgccggcgagtacatctccaacaagaccagctcggtgtttggcaggcagaaggtggagcctgaggccaaggaggagacccggggggcgaagccagaagcagcaccggcggcagctgagtctcagtga

SEQ ID NO: 653 - protein, 113 aa, Triticum aestivum
MERKEGGEKMEEVEVGDGGKKPEEGTKPAPVCFKKPAGEDTGILETTKDYFKQLGNTSADTHWDCIKNRVRAAGEYISNKTSSVFGRQKVEPEAKEETRGAKPEAAPAAAESQ

SEQ ID NO: 654 - DNA, 291 bp, Triticum aestivum
atggattccggtaatacgcagacagacggttctcagccagctgctcctaagaaccctgccatgacgtcgtgccggaagaagaaaactgatgatgatgttaccttccttgaagacgtgaaagaacacatcgacgagttcatccacgcgtccatggatgagcacaagacctgcttcaagaagaccattcagaagatgtttgggatgtcgaaggttgtcgcggagcggtccgctgcagcaaaggaagctgaagtcgaaagcgctttgccccttcagaccagtgtgtcccagtag

SEQ ID NO: 655 - protein, 96 aa, Triticum aestivum
MDSGNTQTDGSQPAAPKNPAMTSCRKKKTDDDVTFLEDVKEHIDEFIHASMDEHKTCFKKTIQKMFGMSKVVAERSAAAKEAEVESALPLQTSVSQ

SEQ ID NO: 656 - DNA, 348 bp, Triticum aestivum
ggtcttttacaatgcgaaatcgctcaggcaaaccatgccccaactagtcgaacacaaggacaaagcgaaaagaaaaactccaggctgataagacctcgcaactctcagtgaatgaagcttcaggttggttcatggaagacgatcacgagctcaggacaagccttcactgagtctcagctgccgccggtgccccttctggcttcgcccccggggtctcctccttggcctcaggctccaccttctgcctgccaaacaccgagctggtcttgttggagatgtagtcgccggcggcgcggaaccggttcttgatgcagtcccagtgcgtgtcggcgctggtgtccttgagct

SEQ ID NO: 657 - protein, 115 aa, Triticum aestivum
MESKESGERMEKVEVGDGGKKPEEGTKQAAAPVCFKKPAGEDTGILETTKDYFKQLKDTSADTHWDCIKNRFRAAGDYISNKTSSVFGRQKVEPEAKEETPGAKPEGAPAAAETQ

SEQ ID NO: 658 - DNA, 291 bp, Triticum aestivum
atggattctggtaatacgcagacagaaggttctcagccacctgttcctaaaaaccctgccatgacgtcgtgccggaagaagaaaactgatgatgatgtcaccttccttgaagatgtgaaagaacacattgacgagttcatccacgcgtccatggatgagcacaagacctgcttcaagaaaaccattcagaagatgtttgggatgtcgaaggttgttgcggagcggtccgctgcagcaaaggaagctgaagtcgaaagcgctttgccccttcagaccagtgtgtcccagtag

SEQ ID NO: 659 - protein, 96 aa, Triticum aestivum
MDSGNTQTEGSQPPVPKNPAMTSCRKKKTDDDVTFLEDVKEHIDEFIHASMDEHKTCFKKTIQKMFGMSKVVAERSAAAKEAEVESALPLQTSVSQ

SEQ ID NO: 660 - DNA, 294 bp, Triticum aestivum
atggattccagcaatgcacagtctgaaggttctcagccacctgttcctcctaaaaaccctaccatgtcgtcgtgccggaagaagaaaaccgatgatgatgccaccttcctcgaagacgtgaaagagcacattgacgagttcatccatgcctccatggacgagcacaagacctgcttcaagaagaccatccagaagatgttcgggatgtcgaaggctgttgcggagcggtccgctgcagcaaaggaagctgaagtcgaaagcgctttgcctcttaagaccagtgtgtcccagtag

SEQ ID NO: 661 - protein, 97 aa, Triticum aestivum
MDSSNAQSEGSQPPVPPKNPTMSSCRKKKTDDDATFLEDVKEHIDEFIHASMDEHKTCFKKTIQKMFGMSKAVAERSAAAKEAEVESALPLKTSVSQ

SEQ ID NO: 662 - DNA, 288 bp, Triticum aestivum
atggattccggtaatacgcagacagaaggttctcagccacttcctaagaaccctgccatgacgtcatgccggaagaagaaaactgatgatgatgttaccttccttgaagatgtgaaagaacacatcgatgagttcatccacgcgtccatggatgaacacaagacctgcttcaagaagaccattcagaagatgtttggcatgtcgaaggttgtcgcagagcggtccgctgcagcaaaggaagctgaagtcgaaagtgctttgccccttcagaccagtgtgtcccagtag

SEQ ID NO: 663 - protein, 95 aa, Triticum aestivum
MDSGNTQTEGSQPLPKNPAMTSCRKKKTDDDVTFLEDVKEHIDEFIHASMDEHKTCFKKTIQKMFGMSKVVAERSAAAKEAEVESALPLQTSVSQ

SEQ ID NO: 664 - DNA, 288 bp, Triticum aestivum
atgtctggcggtatcaagtctgaagtcccccagccatcttcatctcctcctgtgaagcccacctcaacttcgtgccgaaagaagaactccggcacctcgtttgtcacgcaactgagggatcacttccatgagtttattcatgcctccatgggcgaacacaggacatgcttaacaaacactgtcaagaaattgtttgcgatgtcaaaggctgtcgcagaggggaccgctggggcaaaagaagctggagctgaaagcggtttgccactacagagtgaagtgtcacggtag

SEQ ID NO: 665 - protein, 95 aa, Triticum aestivum
MSGGIKSEVPQPSSSPPVKPTSTSCRKKNSGTSFVTQLRDHFHEFIHASMGEHRTCLTNTVKKLFAMSKAVAEGTAGAKEAGAESGLPLQSEVSR

SEQ ID NO: 666 - DNA, 306 bp, Triticum aestivum
atggatatatcacaaagaaatcttctgaaaggcttaacttctgatgagagtgttgttgctaaggactcttccacgctaggtgtggtgattgttaagcattgcggatatacggcaacagtgaaggtttcgggacgcacaaagaacagcagcgatggcaaacaaaccagtgatatctctgatcatcttgatgaaatacctaacatcgatgtggatgatcatccagatggaggttctaatgccttgaatcctcacagtctaagaataccactggccgaaaattatcaacccagaaatcgctgccagtaa

SEQ ID NO: 667 - protein, 101 aa, Triticum aestivum
MDISQRNLLKGLTSDESVVAKDSSTLGVVIVKHCGYTATVKVSGRTKNSSDGKQTSDISDHLDEIPNIDVDDHPDGGSNALNPHSLRIPLAENYQPRNRCQ

SEQ ID NO: 668 - DNA, 249 bp, Tamarix androssowii
tattgctggtttctttcttgctgccatcccttggtacattggagctctaattctactatgtggcagagttgattacagagaaaaaccaggacttgtggtttgcgcaatagcttccattcttgctgttgttgctatcatctttgttgtgagcgaggggaatcaccatcaccaccactggtgattttggcacagatgacactgattgtatattctgcatttttgtgaagcggctgaccaggtctttcgtta

SEQ ID NO: 669 - protein, 82 aa, Tamarix androssowii
MWRDMCTGPMIVFILESLITKDLVSRFTKMQNIQSVSSVPKSPVVVMVIPLAHNKDDSNNSKNGSYCANHKSWFFSVINSAT

SEQ ID NO: 670 - DNA, 435 bp, Tagetes erecta
atggaaaccgatttggaagaaacaacaaaagcactcaatgagatgaatcaaaacaccaacattctaacccgcgaacttgagatttcaaaaaccaaaatttcccagcttgaagacgaaaaagaagctttgtacaactctctcgacgaacacaaacgggtcattcaagaaacccgagaaaacatggaagatgctcatagcatgattatgaaaatagggaaagagagggaacgtttcgaaaagaaaggaagtaaacttgagaaggaactagcagctgcaaaaggtgagattttaagattaagaaatgtaaacgatacgcgatatgcagaaaccgcagaagaggtgaatagtagcagtggaagtgaagatgaagaaacaagtggtttgaaaaaagttaggagaagaaaaaaggttgtatcacaacagaaagaaacataa

SEQ ID NO: 671 - protein, 144 aa, Tagetes erecta
METDLEETTKALNEMNQNTNILTRELEISKTKISQLEDEKEALYNSLDEHKRVIQETRENMEDAHSMIMKIGKERERFEKKGSKLEKELAAAKGEILRLRNVNDTRYAETAEEVNSSSGSEDEETSGLKKVRRRKKVVSQQKET

SEQ ID NO: 672 - DNA, 255 bp, Taraxacum kok-saghyz
atgctccctcggacagaaaggtcgtacggaaacgatatgatcgtttctagcaagacgtacagtttcgatacaaaagcaatcggcgatcaggttccgacagagtggctagagttcaagcacaggtatggccaccaccaccaccatcaccaccagcaccatgacagagatgaagaattcgtgccaaaggagaagagagaacacaaaggcggtttcatgaggaccattcgcaagtttctgaagcacacttttgactga

SEQ ID NO: 673 - protein, 84 aa, Taraxacum kok-saghyz
MLPRTERSYGNDMIVSSKTYSFDTKAIGDQVPTEWLEFKHRYGHHHHHHHQHHDRDEEFVPKEKREHKGGFMRTIRKFLKHTFD

SEQ ID NO: 674 - DNA, 165 bp, Taraxacum kok-saghyz
atggaattttgtcgaaagaagaagacagacaacgccgctgtggaaacaggtcatctccaatactcgatttctccaaatttctccatgaacagggttgctttcttgggtggacaatgggagactatcgtgccacagaggctgcaccaaaggacacacaggttgtag

SEQ ID NO: 675 - protein, 54 aa, Taraxacum kok-saghyz
MEFCRKKKTDNAAVETGHLQYSISPNFSMNRVAFLGGQWETIVPQRLHQRTHRL

SEQ ID NO: 676 - DNA, 498 bp, Triticum monococcum
  misc_feature (469)..(469): n is a, c, g, or t
atggggacgggatgccttcctctggtaccacagatcatggaactctccgataccgggacgtccatctgcccctccaagagctcgttcttcgcaccggctgtgaacgatgaagggctgtcgccgtgccatctgagcctaactctagcatcgtgctcgatggacctcgacagaggccaagcctccaatgcagacgggagcaccaccatcgacgagggaagcgacaacccaccggaggccaccgcagccgccatgggcggtaacccgaaggcatcagtcgatgccggcacagcggaagcgccgactccacgagaggatacgcgggtggccgccgagccggcagctcctgtcaaggcgaatgacaacttctgggaacagttcttgacggagaggccgggagacgcgagctctggcccgagggatccttccatggacaaggagcaaacggaaggcgggggggaaaggacgacangagaagacacggaacagctgaaactctga

SEQ ID NO: 677 - protein, 165 aa, Triticum monococcum
  misc_feature (157)..(157): Xaa can be any naturally occurring amino acid
MGTGCLPLVPQIMELSDTGTSICPSKSSFFAPAVNDEGLSPCHLSLTLASCSMDLDRGQASNADGSTTIDEGSDNPPEATAAAMGGNPKASVDAGTAEAPTPREDTRVAAEPAAPVKANDNFWEQFLTERPGDASSGPRDPSMDKEQTEGGGERTTXEDTEQLKL

SEQ ID NO: 678 - DNA, 192 bp, Triticum monococcum
atgcggagaggtggatcttcagtcccaaatcaaacgctggcgatgcgcgtgagaagaccgccacattgccccatgctcgacgtccgaaggctaaaagtggtcctcttgggcctcctggaagacttggtggacagtattcatctgtatcttcatccgtctctttgtttgacagtgggagagttgggaatttag

SEQ ID NO: 679 - protein, 63 aa, Triticum monococcum
MRRGGSSVPNQTLAMRVRRPPHCPMLDVRRLKVVLLGLLEDLVDSIHLYLHPSLCLTVGELGI

SEQ ID NO: 680 - DNA, 207 bp, Taraxacum officinale
atggatatgcaacatgagaataccgaaaatacccctgctgctaccaaatactgcaacaaagacgtagaaaatgcaaaagaacacatgaaggcgtttgttgatgcatctttggatgaacacaaggcttgcttcaaggcaacttggcacaagatgattgacaaatttcaacaagtaaaatccgatgcattgaaaggtggaaaagattaa

SEQ ID NO: 681 - protein, 68 aa, Taraxacum officinale
MDMQHENTENTPAATKYCNKDVENAKEHMKAFVDASLDEHKACFKATWHKMIDKFQQVKSDALKGGKD

SEQ ID NO: 682 - DNA, 207 bp, Taraxacum officinale
atggatatgcaacatgagaataccgaaaatacccctgctgctaccaaatactgcaacaaagacgtagaaaatgcaaaagaacacatgaaggcgtttgttgatgcatctttggatgaacacaaggcttgctttaaggcaacttggcacaggatgattgacaaatttcaacaagtaaaatccgatgcattgaaaggtggaaaagattaa

SEQ ID NO: 683 - protein, 68 aa, Taraxacum officinale
MDMQHENTENTPAATKYCNKDVENAKEHMKAFVDASLDEHKACFKATWHRMIDKFQQVKSDALKGGKD

SEQ ID NO: 684 - DNA, 270 bp, Taraxacum officinale
atgacaacagaacaaactcagcttccttctgttccacctccagccatggaatcctgtcgaaagaagaagacagataacgccaccttcctccaggatgtcaaagatcacatcgatgagtttctcgatgcttccatgaatgaacacaaaacctgcttcaaaaagacaatttcaaagatgtttggaatgtcaaaaattgtggcagagagaaacgctgctgagaacaagggagttgagagctcattgccccttcgaactgttgtttctgattag

SEQ ID NO: 685 - protein, 89 aa, Taraxacum officinale
MTTEQTQLPSVPPPAMESCRKKKTDNATFLQDVKDHIDEFLDASMNEHKTCFKKTISKMFGMSKIVAERNAAENKGVESSLPLRTVVSD

SEQ ID NO: 686 - DNA, 501 bp, Thalassiosira pseudonana
agaatggagcaatctttttgggtgttcattctggagaggacgacactacttgtagtggacgcgatgaaaatgaagaaacgtcatgcaatggcaacagtgaaacgacaaatgagacaacagacaaaacaacaatcttgtcatcgttcagagatttggcaatgtactccaagattcctcgtgtcgccgcatctctgctacgattggacgaactgcgtgttgggggagcagaaaatatgaaacctggcagcagacgatctcgtgaacgaagcagaagcataaaggaagggaaacaaaacaacaatggaagagctacctctaccgctgtagacgatgatatcacaattgacgagtccatcaatctacgcatatgtcgagacatattcttgacgaaggacaatgatccgtttgcttgcggttggcatgttgatgatactggattctggccgagcattgcatcagatcccggtgtcaatgcatgggttgcattggacgatatgccgt

SEQ ID NO: 687 - protein, 166 aa, Thalassiosira pseudonana
MSADDDQGHGISSNATHALTPGSDAMLGQNPVSSTCQPQANGSLSFVKNMSRHMRRLMDSSIVISSSTAVEVALPLLFCFPSFMLLLRSRDRLLPGFIFSAPPTRSSSNRSRDAATRGILEYIAKSLNDDKIVVLSVVSFVVSLLPLHDVSSFSSRPLQVVSSSPE

SEQ ID NO: 688 - DNA, 168 bp, Tortula ruralis
atgtcggaactaaaagccgaggtggacggtggccgtcgaagcggaccgtactgcctctgtaagccaccttgtttggcgagacgcaacagagtggtcgccttgcggagcaacgaagctttcccaagtgccgttgaaggcacgcttcctatggaccgccgggaccggtag

SEQ ID NO: 689 - protein, 55 aa, Tortula ruralis
MSELKAEVDGGRRSGPYCLCKPPCLARRNRVVALRSNEAFPSAVEGTLPMDRRDR

SEQ ID NO: 690 - DNA, 261 bp, Triphysaria versicolor
atcaaacacaaacacaatgacgaagaattaaacaagccccagagacgtaacaagaagggattttagagtgctatgtggttcttatagttgcacatacaaacagtttattacaagattaatatttaataatccttgttcccgaaattcttgcaccagatctgtgagggaatcggacgaactggcatatgtggacgttgctcgagctcggcggatttcatggcgatgggaatgcagatcaggacgatgccaaacatggcaaaa

SEQ ID NO: 691 - protein, 86 aa, Triphysaria versicolor
MGGGGDHHHADGAHGADFRAKVWSFSGEPNCRPKHWKRNTAFAMFGIVLICIPIAMKSAELEQRPHMPVRPIPSQIWCKNFGNKDY

SEQ ID NO: 692 - DNA, 279 bp, Triphysaria sp.
ctcaacccctgccctttgaagaggcaaaacactttccacttctttagtctccgagtttatttctgcaacgccttttgacatgctgaacatcttcttgaccggcttctggaaacaagatttgtgttcggccctacaagcgaggatgaattcatcgatgtgatctttcccatcttctaaaaaagttgcactttccctcctctttttccggcccgaaaccattgctggagtagcatctgtggataacggcttcccgttccggatggtttcagtacccattgc

SEQ ID NO: 693 - protein, 92 aa, Triphysaria sp.
MGTETIRNGKPLSTDATPAMVSGRKKRRESATFLEDGKDHIDEFILACRAEHKSCFQKPVKKMFSMSKGVAEINSETKEVESVLPLQRAGVE

SEQ ID NO: 694 - DNA, 279 bp, Triphysaria sp.
aatcccgggcatcgggattattgggttgttctagggccaatggggaaaaaattaaaaggaactttaccccccccctggcgtttgaaaaggcaaaacactttccacttctttagtccccgagtttctttctgcaacagcttttgacatgctgaacatcttcttgaccgtcttctggaaacaggttttgggttcccccaaaaaagcggggaagaattcatcgaggggatctttcccatcttctaaaaaagttgcactttcacccttctttttccggcatga

SEQ ID NO: 695 - protein, 92 aa, Triphysaria sp.
MATENIQNGKPFSPGVTPAMGSCRKKKGESATFLEDGKDPLDEFFPAFLGEPKTCFQKTVKKMFSMSKAVAERNSGTKEVESVLPFQTPGGG

SEQ ID NO: 696 - DNA, 279 bp, Triphysaria sp.
atggctactgaaaacatccagaacgagaagccgttatccacagctgctactccagcaatggcttcatgccggaaaaagaagagtgaaagtgcaacttttttagaagatgtgaaagatcacatcgatgaattcatacacgcttctatggacgaacacaaaacctgtttccagaagacggtcaagaagatgttcagcatgtcaaaagctgttgcagaaagaaactcggagactaaagaagtggaaagtgttttgcctcttcaaacgacagtggctgagtaa

SEQ ID NO: 697 - protein, 92 aa, Triphysaria sp.
MATENIQNEKPLSTAATPAMASCRKKKSESATFLEDVKDHIDEFIHASMDEHKTCFQKTVKKMFSMSKAVAERNSETKEVESVLPLQTTVAE

SEQ ID NO: 698 - DNA, 378 bp, Vitis arizonica x rupestris
gggttgccgggaagggatgaggctgagaaagaagcactttctggtgttagaaacaacaagagagcgtcgcctgacacaagtgatgagtgtggatccaagggaagttctaatggtgatcgtgaaaatgcacctgccacgaaggcacaagttgtagggtggccaccaatccgatcctttcggaaaaatagcttccaaccgaagaagactgaggcggaggctgctggaatgttcgtgaaagtaagcatggatggagctccttacctcagaaagattgatctgaaggtttacaaaggctatccggagctccttcaggctctacagaatatgttcaaattcactataggtgattattcagagagagagggctacaagggatca

SEQ ID NO: 699 - protein, 125 aa, Vitis arizonica x rupestris
MLTFTNIPAASASVFFGWKLFFRKDRIGGHPTTCAFVAGAFSRSPLELPLDPHSSLVSGDALLLFLTPESASFSASSLPGNPSLSSVAFKFRSLSYATAPSIFNLPSKSNTNIFSQIEASLNYLI

SEQ ID NO: 700 - DNA, 462 bp, Vaccinium corymbosum
  misc_feature (5)..(5): n is a, c, g, or t
atgcncgagaaagtcaacaacagggggctttgtgctgttgctcaggctgagtctctccgctacaagttactcggtggacttgctgttcggagggcatgctatggtgttctgaggtttgttatggagagcggggcaaagggatgcgaggtgattgtcagcgggaagctcagggcacagcgtgccaagtctatgaaattcaaggatggttacatgatatcttctggtcagccggtcaatgaatatattgattcagctgtcagacatgttcttcttagacagggtgtacttggtataaaggtcaagatcatgcttgattgggatcccaagggaaagcagggtccaacaacaccacttccggatgttgtcacaatccacacccctaaagaggaagacgaatacttcagatcagcagtgacccaaactgccgaagttgaggccgccatgccgcccatcatggtttaa

SEQ ID NO: 701 - protein, 153 aa, Vaccinium corymbosum
  misc_feature (2)..(2): Xaa can be any naturally occurring amino acid
MXEKVNNRGLCAVAQAESLRYKLLGGLAVRRACYGVLRFVMESGAKGCEVIVSGKLRAQRAKSMKFKDGYMISSGQPVNEYIDSAVRHVLLRQGVLGIKVKIMLDWDPKGKQGPTTPLPDVVTIHTPKEEDEYFRSAVTQTAEVEAAMPPIMV

SEQ ID NO: 702 - DNA, 282 bp, Vitis vinifera
atggaagctcaaaacaatcaacatgaaacacaaccggcatctgctgccaaggccccagttgtgacttcatgtcgaaagaagaagtcagatgacgccacctttttgcaggatgtaaaggatcatattgatgagttcattcatgcttctatggatgaacacaaaacttgctttacgaagactattaagaagatgtttggaatgtcaaaggtggtagctgaaaggaattctaactctgagggagttgaaagttctcttcccctccagacaacaatagccaactag

SEQ ID NO: 703 - protein, 93 aa, Vitis vinifera
MEAQNNQHETQPASAAKAPVVTSCRKKKSDDATFLQDVKDHIDEFIHASMDEHKTCFTKTIKKMFGMSKVVAERNSNSEGVESSLPLQTTIAN

SEQ ID NO: 704 - DNA, 216 bp, Yucca filamentosa
ttgcaaaatccattgggtggaagcaatttttgtcactcatggagcagaaggagccgaccattcttcgagcttacacaaccttgtgtttgagcaaatctggaacgcttcaaaaaaatcaaatattgacatcacttcaaagtgcaggccttcctgccaatgaagataatgctgttgctatgatgcgatatctgaatgcagacacaggtcaatccattt

SEQ ID NO: 705 - protein, 71 aa, Yucca filamentosa
MELELPFPVLCCRTMPSIAPEALEDLEQHLSEQACLLQRYQSAIHGLKIDQELLGWNPYIAPAPLSAEALK

SEQ ID NO: 706 - DNA, 261 bp, Zantedeschia aethiopica
tcaacgtgcgccaggctgggccgaccgttagctccgaccatgagccattccaagtgcccggcatacctcatcggatagaggtaacgatggcccagctcccctccaatttcgccatgaactccgtcatgcaagacttccgggagcaaatccgggaagcggaggcggagacctacggcgtggtggtcaacagcttccaggacctggagcacgggtatgaccagctgtaccaggaggccatggggatgaaggcttggagcgtcg

SEQ ID NO: 707 - protein, 86 aa, Zantedeschia aethiopica
MGRRALMHSSVEFHPHCVKNPPTAGCDRISTCGAQPLMIRHFPLVLSSNPSESHLSTSAVRSSPALITQMKGWFEASSPSPISTSC

SEQ ID NO: 708 - DNA, 240 bp, Zinnia elegans
atgacaacagaaaaaagtgaacaatcaattccttctgcttctgctccagtcatgacatcatgtaggaggaagaaatcagaagatgcaactttcttgcaggatgtgaaaaatcacattgatgagttcatacatgcttctgttgctgaacataaaacatgcttccaaaagaccattttaaaggtttgttttctcaatccaatgcacacccatgacacatgtgagccgtgcgtctgtgtataa

SEQ ID NO: 709 - protein, 79 aa, Zinnia elegans
MTTEKSEQSIPSASAPVMTSCRRKKSEDATFLQDVKNHIDEFIHASVAEHKTCFQKTILKVCFLNPMHTHDTCEPCVCV

SEQ ID NO: 710 - DNA, 288 bp, Zea mays
gctttgtttgcttccgcggatctctctgcaacagccttcgacatcccaaacatcttctgaattgtcttcttaaagcaggtcttgggctcatccatagaggcatgaatgaactcatccatgtggtctttcagatcttcaaggaaggtagcatcatctgttttcttcttccggcatgatgccatagcgggatttttggggacagatggtgctggagcttctgtctgaccattgcttgacgccatcttaagactggaccaagaccaagagccaaaagaaagaaagaaaaca

SEQ ID NO: 711 - protein, 95 aa, Zea mays
MASSNGQTEAPAPSVPKNPAMASCRKKKTDDATFLEDLKDHMDEFIHASMDEPKTCFKKTIQKMFGMSKAVAERSAEANKAEVESALPLQTSVSQ

SEQ ID NO: 712 - DNA, 327 bp, Zea mays
  misc_feature (186)..(186): n is a, c, g, or t
  misc_feature (250)..(250): n is a, c, g, or t
atggcttcaagcgatgatcagacagaagctgcggccccatctgtccccaaaaaccctgctatggcatcatgccggaagaagaaaacggatgatgctaccttcctcgaagatctgaaagaccacatcgatgagttcatccatgcctccatggatgagcacaagaccctgcttaagaagacgatccanaagaatgtttgggatgtcgaaggctgttgcaaagagatccgcggcaaaagcgaaggaagctggnagtggaaagtgctttgccactttcagaacagtggtctccgcagtaaaatttcaccgttggggaatttcttggcttga

SEQ ID NO: 713 - protein, 108 aa, Zea mays
  misc_feature (62)..(62): Xaa can be any naturally occurring amino acid
  misc_feature (84)..(84): Xaa can be any naturally occurring amino acid
MASSDDQTEAAAPSVPKNPAMASCRKKKTDDATFLEDLKDHIDEFIHASMDEHKTLLKKTIXKNVWDVEGCCKEIRGKSEGSWXWKVLCHFQNSGLRSKISPLGNFLA

SEQ ID NO: 714 - DNA, 291 bp, Zea mays
atggcgtcaagcaatggtcagacagaagctccagcaccatctgtccccaaaaatcctgctatggcatcatgccggaagaagaaaacagatgatgctaccttccttgaagatctgaaagaccacatggatgagttcattcacgcctccatggatgagcacaagagctgctttaagaagacaattcagaagatgtttgggatgtcgaaggctgttgcagagagatccgcggcggaagcaaacaaagctgaagttgaaagtgctttgccacttcagaccagtgtctcgcagtag

SEQ ID NO: 715 - protein, 96 aa, Zea mays
MASSNGQTEAPAPSVPKNPAMASCRKKKTDDATFLEDLKDHMDEFIHASMDEHKSCFKKTIQKMFGMSKAVAERSAAEANKAEVESALPLQTSVSQ

SEQ ID NO: 716 - DNA, 366 bp, Zea mays
ggagggatctattcaatccctattagatccacttggagaattaaaatcttcgaacgtagcctaagggatttgatccgtgactgccgaacaaagcctcagtgagattcaactgctgctgctgcgggcttcaccacctccggagtctcatccttgaccgcagggtcgatcttctgcttgcggttgccgaacaccgagccgcgcttctggtcgaagtagctcttgaagcagatccagtgcttttgcgcgggtacctccttgaactggttgaagtagtccttggcgatctccaggaacgtcgcctcctcccccaccgtcttcttgtagcacttctcccgcgcctccggtgccagcagctgcacggtgagg

SEQ ID NO: 717 - protein, 121 aa, Zea mays
MVKDGGVKKVAVAAPAPAPEEATPTGLTATPTLTVQLLAPEAREKCYKKTVGEEATFLEIAKDYFNQFKEVPAQKHWICFKSYFDQKRGSVFGNRKQKIDPAVKDETPEVVKPAAAAVESH

SEQ ID NO: 718 - DNA, 240 bp, Zea mays
atgaccaccgaacctcaaggatcacatcaacatggttcaaaacgtgatttgccttcatgccgaaaaaatgtgcccggcacatcatttgtctcagatttgagagatcacatccacgagttcatcaacgcctcttctgatgaacacatgacatgcttcacaaagactatcaagaagatgttcgggatgtcaatgactgtcgcacataaatcctcgaaagcagaggaagctgggcccgcatga

SEQ ID NO: 719 - protein, 79 aa, Zea mays
MTTEPQGSHQHGSKRDLPSCRKNVPGTSFVSDLRDHIHEFINASSDEHMTCFTKTIKKMFGMSMTVAHKSSKAEEAGPA

SEQ ID NO: 720 - DNA, 291 bp, Zea mays
atggcgtcaaccaatggtcagacagaagctccagcaccatctgtccccaaaaatcccgctatggcatcatgccgaaagaagaaaacagatgatgttaccttccttgaagatctgaaagaccacatggatgagttcattcatgcctccatggatgagcacaagacctgctttaagaagacaattcagaagatgtttgggatgtcgaaggctgttgcagagagatccgcggtggaagcaaacaaagctgaagttgaaagtgctttgccacttcagaccagtgtctcgcagtag

SEQ ID NO: 721 - protein, 96 aa, Zea mays
MASTNGQTEAPAPSVPKNPAMASCRKKKTDDVTFLEDLKDHMDEFIHASMDEHKTCFKKTIQKMFGMSKAVAERSAVEANKAEVESALPLQTSVSQ

SEQ ID NO: 722 - DNA, 279 bp, Zea mays
atgtctggtcatacccaacctgaaggaccacaccaacttgattcaaaacatgctgcaaattcatgccgaaagaatgtacccggtacatcgttcgtctcagatttgagggatcacatccacgagttcatcaatgcctctgcagatgaacaccggacatgcttcacaaagactctcaaaaggatgttcgatatgtcaaagactgtcactgatagatcctctgaagcagaggaagctggacccgaaagtgtcttgccacttcagaccacagtgtcgcggtag

SEQ ID NO: 723 - protein, 92 aa, Zea mays
MSGHTQPEGPHQLDSKHAANSCRKNVPGTSFVSDLRDHIHEFINASADEHRTCFTKTLKRMFDMSKTVTDRSSEAEEAGPESVLPLQTTVSR

SEQ ID NO: 724 - DNA, 240 bp, Zea mays
atgaccaccgaacctcaaggatcacatcaacatggttctaaacgtgatttgcattcatgccgaaaaaatgtacccggcacatcattcgtctcagatttgagagatcacatccacgagttcatcaacgcctcttctgatgaacacatgacatgcttcacaaagactatcaagaagatgttcgggatgtcaaagactgtggcacataaatcgtcggaagcagagcaagctgggccctcatga

SEQ ID NO: 725 - protein, 79 aa, Zea mays
MTTEPQGSHQHGSKRDLHSCRKNVPGTSFVSDLRDHIHEFINASSDEHMTCFTKTIKKMFGMSKTVAHKSSEAEQAGPS

SEQ ID NO: 726 - DNA, 357 bp, Zea mays
tcatataattagatccacttggggaattaaaatcttgaaaccgaacatagcctaagggacaactgctgctgctgcgggcttcaccacctccggagtctcatccttgaccgcagggtcgatcttctgcttgcggttgccgaacaccgagccgcgcttctggacgaagtagctcttgaagcagatccagtgcttttgcgcgggtacctccttgaactggttgaagtagtccttagcgatctccaggaacgtcgcatcctcccccaccgtcttcttatagcacttctcccgcgcctctggtgccggtagcttcacggtgagggtcggcgtcgcggtcaggccggttggcgtcgcttcctc

SEQ ID NO: 727 - protein, 118 aa, Zea mays
MVKDGGVKKVAVAAPAPEEATPTGLTATPTLTVKLPAPEAREKCYKKTVGEDATFLEIAKDYFNQFKEVPAQKHWICFKSYFVQKRGSVFGNRKQKIDPAVKDETPEVVKPAAAAVVP

SEQ ID NO: 728 - DNA, 357 bp, Zea mays
ccctgagacgatcataaccccttcaggtcttgttcgtttgtgccggattggttggtaggaacgatttctaaccggattgtttctctaatttatataaactttaattaactggaacgattccaggtgcaatccggcgaggcctcagtgagattcaactgctgctgctgcgggcttcaccacctccggagtctcatccttgaccgcagggtcgatgatcttctgcttgccgaacaccgagccgcgcttctggtcgaagtagctcttgaagcagatccagtgcttttgcgcgggtacctccttgaactggttgaagtagtccttagcgatctccaggaacgtcgcatcctcccccaccgt

SEQ ID NO: 729 - protein, 118 aa, Zea mays
MVKDGGVKKVAVAAPAPEEATPTGLTATPTLTVKLPAPEAREKCYKKTVGEDATFLEIAKDYFNQFKEVPAQKHWICFKSYFDQKRGSVFGKQKIIDPAVKDETPEVVKPAAAAVESH

SEQ ID NO: 730 - DNA, 321 bp, Zea mays
aggcagtgatgaactcgtggatgtgatccctcaaatctgagacgaacgatgtaccgggtacattctttcggcatgaattcacagcatgttttgaatcaagttggggtggtccttcaggttgggtatgaccagacatcgtcacgtcagactgcaaatgatgcaaacagatgtaagccatagcacgagagaaaccagttcatcgctcaaagggggacttgtttacaaaactacttctcaattgggtttggcagagtgcaatacaatcatacaagaactaggctttcaggagtcacattggtattgtatcctaatgattggggt

SEQ ID NO: 731 - protein, 106 aa, Zea mays
MAYICLHHLQSDVTMSGHTQPEGPPQLDSKHAVNSCRKNVPGTSFVSDLRDHIHEFITASADEHRTCFTKTLKRMFDMSKTVTDRSSEAEEAGPESVLPLQTTVSR

SEQ ID NO: 732 - DNA, 315 bp, Zea mays
atgtctggtcatacccaacctgaaggaccacgccaacttgattcaaaacatgctgtgaattcatgccgaaagaatgtacccggtacatcgttcgtctcagatttgagggatcacatccacgagttcatcactgcctctgcagatgaacaccggacatgcttcacaaagactctcaaaaggatgttcgatatgtcaaagactgtcactgatagatcctctgaagcagaggaagctggacccgaaagcgttttgccacttcagaccacagcgccgcggtacaagcttcgccacttcatattgcctctggagaaatag

SEQ ID NO: 733 - protein, 104 aa, Zea mays
MSGHTQPEGPRQLDSKHAVNSCRKNVPGTSFVSDLRDHIHEFITASADEHRTCFTKTLKRMFDMSKTVTDRSSEAEEAGPESVLPLQTTAPRYKLRHFILPLEK

SEQ ID NO: 734 - DNA, 291 bp, Zea mays
atggcttcaagcgatggtcagacagaagctgcggccccatctgtccccaaaaaccctgctatggcatcatgccggaagaagaaaacagatgatgctaccttcctcgaagatctgaaagaccacatcgatgagttcatccatgcctccatggatgagcacaagacctgctttaagaagacgatccagaagatgtttgggatgtcgaaggctgttgcagagagatccgcggcagaagcgaaggaagctggagttgaaagtgctttgccacttcagaccagtgtctcgcagtag

SEQ ID NO: 735 - protein, 96 aa, Zea mays
MASSDGQTEAAAPSVPKNPAMASCRKKKTDDATFLEDLKDHIDEFIHASMDEHKTCFKKTIQKMFGMSKAVAERSAAEAKEAGVESALPLQTSVSQ

SEQ ID NO: 736 - DNA, 369 bp, Zea mays
tccaagtggattgagtgaaagggagggatccactccctcacagaattagatccacttggggaattaaaatcttgaaaccgaacatagcctaagggacaactgctgctgctgcgggcttcaccacctccggagtctcatccttgaccgcagggtcgatcttctgcttgcggttgccgaacaccgagccgcgcttctggtcgaagtagctcttgaagcagatccagtgcttttgcgcgggtacctccttgaactggttgaagtagtccttggcgatctccaggaacgtcgcctcctcccccaccgtcttcttgtagcacttctcccgcgcctccggtgccagcagctgcacggtgagggtcggcgtcgcgg

SEQ ID NO: 737 - protein, 122 aa, Zea mays
MVKDGGVKKVAVAAPAPAPAPEEATPTGLTATPTLTVQLLAPEAREKCYKKTVGEEATFLEIAKDYFNQFKEVPAQKHWICFKSYFDQKRGSVFGNRKQKIDPAVKDETPEVVKPAAAAVVP

SEQ ID NO: 738 - DNA, 624 bp, Zingiber officinale
aacttgaagagtagtcatacaagaaagctcattacaatgaattcagagcctttagcctttgatctaacaaatcacagctgaaaaatgtggtctagagacgaaagctcagagttgatattctcaagagcatcttgatcaacatggacagtcgagcacatcttaggcagggaacgaaaatacaatgctgctttactttcagtgaattgatatccactcagattattagatctgcgctgaagcatcaaatctgaacaagctgtcaggtcttctttgcttgctgctctgttcaatttactaattagatctgccatgctcgcattcttgtcatagcgtgactgcataatcattttcgatcttttaaactctttgacatcatctgggtcatcatcataggtctcataatcatcaaaaccaagttctccattcagcaattccagtaatttctggtcaataagactttttattctctcccttaaagtatcagttctttgagaatcagattcaagcttcgttttgatatctgagattaatttttcagaaggaatagaaccagaagaaacctgactttgagtttctgcttcttccatgatcggtaatgagaatgtttcctccaacaaactcaca

SEQ ID NO: 739 - protein, 207 aa, Zingiber officinale
MKLREHLEGNVEAENEAFDRYVQNVSLLEETFSLPIMEEAETQSQVSSGSIPSEKLISDIKTKLESDSQRTDTLRERIKSLIDQKLLELLNGELGFDDYETYDDDPDDVKEFKRSKMIMQSRYDKNASMADLISKLNRAASKEDLTACSDLMLQRRSNNLSGYQFTESKAALYFRSLPKMCSTVHVDQDALENINSELSSLDHIFQL

SEQ ID NO: 740 - DNA, 56 bp, Artificial sequence
  primer: prm14300
ggggacaagtttgtacaaaaaagcaggcttaaacaatggaatccattaagacacaa

SEQ ID NO: 741 - DNA, 47 bp, Artificial sequence
  primer: prm14301
ggggaccactttgtacaagaaagctgggtcagaaggcaaacaagctg

SEQ ID NO: 742 - protein, 50 aa, Artificial sequence
  motif 7
  VARIANT (1)..(1): / replace = "His" / replace = "Pro" / replace = "Ser"
  VARIANT (2)..(2): / replace = "Cys"
  VARIANT (3)..(3): / replace = "Arg"
  VARIANT (4)..(4): / replace = "Lys"
  VARIANT (6)..(6): / replace = "Lys"
  VARIANT (7)..(7): / replace = "Ser" / replace = "Thr"
  VARIANT (8)..(8): / replace = "Asp"
  VARIANT (9)..(9): / replace = "Asp"
  VARIANT (10)..(10): / replace = "Ala" / replace = "Val"
  VARIANT (11)..(11): / replace = "Thr"
  VARIANT (13)..(13): / replace = "Leu"
  VARIANT (14)..(14): / replace = "Glu"
  VARIANT (17)..(17): / replace = "Glu"
  VARIANT (20)..(20): / replace = "Met"
  VARIANT (21)..(21): / replace = "Asp"
  VARIANT (25)..(25): / replace = "His"
  VARIANT (28)..(28): / replace = "Ser" / replace = "Met"
  VARIANT (32)..(32): / replace = "Arg" / replace = "Lys"
  VARIANT (33)..(33): / replace = "His"
  VARIANT (36)..(36): / replace = "Lys"
  VARIANT (37)..(37): / replace = "Asn"
  VARIANT (39)..(39): / replace = "Leu"
  VARIANT (40)..(40): / replace = "Gln"
  VARIANT (41)..(41): / replace = "Arg"
  VARIANT (44)..(44): / replace = "Asp"
  VARIANT (47)..(47): / replace = "Met"
  VARIANT (48)..(48): / replace = "Ala" / replace = "Val"
  VARIANT (50)..(50): / replace = "Thr"
NSCRKNVPGTSFVSDLRDHIHEFINASADEHMTCFTKTIKKMFGMSKTVA

SEQ ID NO: 743 - protein, 50 aa, Artificial sequence
  motif X
SCRKKKSDDATFLEDLKDHIDEFIHASMDEHKHCFKNTIQKMFGMSKVVA

SEQ ID NO: 744 - DNA, 2194 bp, Oryza sativa; identical to SEQ ID NO: 247

SEQ ID NO: 745 - DNA, 3109 bp, Artificial sequence
  expression cassette pGOS2::GRP::terminator
aatccgaaaagtttctgcaccgttttcaccccctaactaacaatatagggaacgtgtgctaaatataaaatgagaccttatatatgtagcgctgataactagaactatgcaagaaaaactcatccacctactttagtggcaatcgggctaaataaaaaagagtcgctacactagtttcgttttccttagtaattaagtgggaaaatgaaatcattattgcttagaatatacgttcacatctctgtcatgaagttaaattattcgaggtagccataattgtcatcaaactcttcttgaataaaaaaatctttctagctgaactcaatgggtaaagagagagattttttttaaaaaaatagaatgaagatattctgaacgtattggcaaagatttaaacatataattatataattttatagtttgtgcattcgtcatatcgcacatcattaaggacatgtcttactccatcccaatttttatttagtaattaaagacaattgacttatttttattatttatcttttttcgattagatgcaaggtacttacgcacacactttgtgctcatgtgcatgtgtgagtgcacctcctcaatacacgttcaactagcaacacatctctaatatcactcgcctatttaatacatttaggtagcaatatctgaattcaagcactccaccatcaccagaccacttttaataatatctaaaatacaaaaaataattttacagaatagcatgaaaagtatgaaacgaactatttaggtttttcacatacaaaaaaaaaaagaattttgctcgtgcgcgagcgccaatctcccatattgggcacacaggcaacaacagagtggctgcccacagaacaacccacaaaaaacgatgatctaacggaggacagcaagtccgcaacaaccttttaacagcaggctttgcggccaggagagaggaggagaggcaaagaaaaccaagcatcctcctcctcccatctataaattcctccccccttttcccctctctatataggaggcatccaagccaagaagagggagagcaccaaggacacgcgactagcagaagccgagcgaccgccttcttcgatccatatcttccggtcgagttcttggtcgatctcttccctcctccacctcctcctcacagggtatgtgcccttcggttgttcttggatttattgttctaggttgtgtagtacgggcgttgatgttaggaaaggggatctgtatctgtgatgattcctgttcttggatttgggatagaggggttcttgatgttgcatgttatcggttcggtttgattagtagtatggttttcaatcgtctggagagctctatggaaatgaaatggtttagggtacggaatcttgcgattttgtgagtaccttttgtttgaggtaaaatcagagcaccggtgattttgcttggtgtaataaaagtacggttgtttggtcctcgattctggtagtgatgcttctcgatttgacgaagctatcctttgtttattccctattgaacaaaaataatccaactttgaagacggtcccgttgatgagattgaatgattgattcttaagcctgtccaaaatttcgcagctggcttgtttagatacagtagtccccatcacgaaattcatggaaacagttataatcctcaggaacaggggattccctgttcttccgatttgctttagtcccagaattttttttcccaaatatcttaaaaagtcactttctggttcagttcaatgaattgattgctacaaataatgcttttatagcgttatcctagctgtagttcagttaataggtaatacccctatagtttagtcaggagaagaacttatccgatttctgatctccatttttaattatatgaaatgaactgtagcataagcagtattcatttggattattttttttattagctctcaccccttcattattctgagctgaaagtctggcatgaactgtcctcaattttgttttcaaattcacatcgattatctatgcattatcctcttgtatctacctgtagaagtttctttttggttattccttgactgcttgattacagaaagaaatttatgaagctgtaatcgggatagttatactgcttgttcttatgattcatttcctttgtgcagttcttggtgtagcttgccactttcaccagcaaagttcatttaaatcaactagggatatcacaagtttgtacaaaaaagcaggcttaaacaatggaatccattaagacacaatctcaaggttctgcctcttctgttccaaagaacccagccatgtcctcttgtcggaagaagaagtctgacgacgctacgttcctcgaagatctgaaagaccatatcgacgagttcatccatgcctccatggatgagcacaagcattgcttcaaaaacaccatccagaagatgcttgggatgtcaaaggttgtcgcagagcgttccgctgaagcaaaagaagctgaagtcgagagcgctttgcctcttcagaccagtgtctcgcagtaggatgccatggctgatggcagcttgtttgccttctgacccagctttcttgtacaaagtggtgatatcacaagcccgggcggtcttctagggataacagggtaattatatccctctagatcacaagcccgggcggtcttctacgatgattgagtaataatgtgtcacgcatcaccatgggtggcagtgtcagtgtgagcaatgacctgaatgaacaattgaaatgaaaagaaaaaaagtactccatctgttccaaattaaaattcattttaaccttttaataggtttatacaataattgatatatgttttctgtatatgtctaatttgttatcatccgggcggtcttctagggataacagggtaattatatccctctagacaacacacaacaaataagagaaaaaacaaataatattaatttgagaatgaacaaaaggaccatatcattcattaactcttctccatccatttccatttcacagttcgatagcgaaaaccgaataaaaaacacagtaaattacaagcacaacaaatggtacaagaaaaacagttttcccaatgccataatactcgaac

SEQ ID NO: 746 - DNA, 342 bp, Solanum lycopersicum
atgtgtcatgcaatttcagatcatttagagtcatttcaaccttcatgttacactgacctagtccacaagtcacaaacatctaaaacaaacaagatacatgtgctcaagctaagaagaaggaatggtgaaagattgtccaacgaagcaaagaaaagggcaaagttaagtaaattgaagaaaataatgaagatgaagaatttgaagctctacgaagagaacaaaatcattattgaagagaatgaaaagttacgcaaaagagctcttcttcttcatcaagaaaacaaagacttattcactcaaattattcaacaaatttctcaaccctctaataatcacaattag

SEQ ID NO: 747 - protein, 113 aa, Solanum lycopersicum
MCHAISDHLESFQPSCYTDLVHKSQTSKTNKIHVLKLRRRNGERLSNEAKKRAKLSKLKKIMKMKNLKLYEENKIIIEENEKLRKRALLLHQENKDLFTQIIQQISQPSNNHN

SEQ ID NO: 748 - DNA, 339 bp, Populus trichocarpa
atgtgtactggtacttgttcgaaactgagcccatgcagtcccttgtatattgctcttagcaatcaacagccatcaaaaggacacaaccttcgatatcatagactcaaccgaaggagaaggttgtcaaaagggaagagggtagcactggtactggtcaagaaagagatggaaatcaagaacttgaaactgtacatggagaacaaaagcatcatagaagagaatgagaagctgagaaaggaagcatttcttctacaccaggaaaatcaagctttgctttatcagctccaaaagaagcgctctaatcctcgccatgaccacttggctcacagcaacaactaa

SEQ ID NO: 749 - protein, 112 aa, Populus trichocarpa
MCTGTCSKLSPCSPLYIALSNQQPSKGHNLRYHRLNRRRRLSKGKRVALVLVKKEMEIKNLKLYMENKSIIEENEKLRKEAFLLHQENQALLYQLQKKRSNPRHDHLAHSNN

SEQ ID NO: 750 - DNA, 315 bp, Arachis hypogaea
atgtgctattcctcttcaaaacataccctaaatgttcctcttgtttcttcatgttcatcaaagacacaacatcttcagttgagcttccttagaagaaggagagcacaattgaaagaagcaagagagaggagaaagataactgtggtgaagacacagattaagatgagaaacttgaaactttacaaagagaaccaaaacttattaaatgagaatgagaggttgagaaaccaagccatgcttctttacaaagagaatcaagacctcttatctaagctccaaaagaagccttcacaacaaaataacaagaataattga

SEQ ID NO: 751 - protein, 104 aa, Arachis hypogaea
MCYSSSKHTLNVPLVSSCSSKTQHLQLSFLRRRRAQLKEARERRKITVVKTQIKMRNLKLYKENQNLLNENERLRNQAMLLYKENQDLLSKLQKKPSQQNNKNN

SEQ ID NO: 752 - DNA, 279 bp, Arabidopsis lyrata
atgtgtttgagttcttcagaaccattttcagacacacccacgagattagtattgtacctcaaaacacaaagtcacgttcgtattcctcgtctctccaggaggagacggatgtggcgggaagaaaagaagatggagatgatcaatctaaagctttacgtggagaatcaaaacatcataagagagaacgagaaacttaggaagaaagctcttcttcttcaccaagaaaacaaagctctcttctctctgcttcagaccaaaaaactctcctctgttccataa

SEQ ID NO: 753 - protein, 92 aa, Arabidopsis lyrata
MCLSSSEPFSDTPTRLVLYLKTQSHVRIPRLSRRRRMWREEKKMEMINLKLYVENQNIIRENEKLRKKALLLHQENKALFSLLQTKKLSSVP

SEQ ID NO: 754 - DNA, 318 bp, Arabidopsis lyrata
atgtgtctgacatcttcagagccaccattcccagacactcacacaccaaccatgagaccatcttcgtaccacaacaaacataaatctaagacacaatcccatcttcgtatccttaatctcaccaggagaagaagattactgaaggaacagaaggtgatggagatgagaaacttgaagcttttcgtagcgaatcaaagcatcatgcgagagaatgaagctttaaaaaagaaagctcttcttctccaccaagaaaacaatgctctgtttgctctgcttcatccaaaaccctcccctgttgccacctccttgcttctgtga

SEQ ID NO: 755 - protein, 105 aa, Arabidopsis lyrata
MCLTSSEPPFPDTHTPTMRPSSYHNKHKSKTQSHLRILNLTRRRRLLKEQKVMEMRNLKLFVANQSIMRENEALKKKALLLHQENNALFALLHPKPSPVATSLLL

SEQ ID NO: 756 - DNA, 411 bp, Arabidopsis thaliana
atgcaaagggaacacaaaactcacaacaaactttctttcatctatataacgcctctctatatctcacccattaatcaaacacgtctcacttatctctcttcttcatttcttctctcttcaagctccaagatgtgtttaagttcttcagaaacattttcagacacacccacgagattagttttatacctcaaaacacaaagtcacgttcgtatccctcgtctctccaggaggagacggatgtggcgggaagagaaaaagatggagatgatcaatctaaagctttacgtggagaatcaaaacatcataagagagaacgagaaacttaagaagaaagctcttcttcttcaccaagaaaacaaaactctcttctctctgcttcagaccaaaaaactctcctctgtccataaataa

SEQ ID NO: 757 - protein, 136 aa, Arabidopsis thaliana
MQREHKTHNKLSFIYITPLYISPINQTRLTYLSSSFLLSSSSKMCLSSSETFSDTPTRLVLYLKTQSHVRIPRLSRRRRMWREEKKMEMINLKLYVENQNIIRENEKLKKKALLLHQENKTLFSLLQTKKLSSVHK

SEQ ID NO: 758 - DNA, 318 bp, Arabidopsis thaliana
atgtgtctgacaacttcagagccaccattcccagacactgacacaccaactatgagatctgcttcgtaccatatcaaacataaatctaagacacaaacccatcttcgtatccttaatctcaccaggaggagaagattactgaaggaacagaaggagatggagatgaggaacttgaagcttttcgtagagaatcaaagcatcatacgagagaatgaagctttaaaaaagaaagctcttcttctccaccatgaaaacaatgctctgtttgctctgcttcacccaaaatactcccctgtttcaacctccttgcttcagtga

SEQ ID NO: 759 - protein, 105 aa, Arabidopsis thaliana
MCLTTSEPPFPDTDTPTMRSASYHIKHKSKTQTHLRILNLTRRRRLLKEQKEMEMRNLKLFVENQSIIRENEALKKKALLLHHENNALFALLHPKYSPVSTSLLQ

SEQ ID NO: 760 - DNA, 285 bp, Amborella trichopoda
atgtgtttctgcaacttcttgagccccccatcttctctcaatccctcattcgcgaagcttcgcataaagaaacccaaggtccgaattcttataagaaggaggttcgaagaggcttcggagatggagatttcgaacttggaactttacctgcaaaattggtgcataattgaagagaacgagaggctgaggaagaaggccttggtacttgaccaagagaacagggctttgctttctgaattgaacaagaaattctctggtttcaataaagtcgtcgccaaaccatag

SEQ ID NO: 761 - protein, 94 aa, Amborella trichopoda
MCFCNFLSPPSSLNPSFAKLRIKKPKVRILIRRRFEEASEMEISNLELYLQNWCIIEENERLRKKALVLDQENRALLSELNKKFSGFNKVVAKP

SEQ ID NO: 762 - DNA, 279 bp, Brassica napus
atgtgtttgagttcttcacaaccattctcagacacacccacgagattagttttgtacctcaaaacacaaacccacgttcgtatccctcgcctatccaggaggagaaggatgtggaggaaagaaaaagagatggagatgaaaaatataaggctttacatggagaaccaatacatcatacaagagaatgagaaactcaagaagaaagctcttcttcttcatcaagaaaacaaagctctcttctctcagcttcagaccaaaaatgtttcacatgttccttaa

SEQ ID NO: 763 - protein, 92 aa, Brassica napus
MCLSSSQPFSDTPTRLVLYLKTQTHVRIPRLSRRRRMWRKEKEMEMKNIRLYMENQYIIQENEKLKKKALLLHQENKALFSQLQTKNVSHVP

SEQ ID NO: 764 - DNA, 330 bp, Capsicum annuum
atgtgccatggagtatcagatttagagtcatttcagacttcttgctacacagatctagtccataggccagacccagagccatctaaaacagccaaggcacatgtggtcagtctaagaagaaggaatggtgagagattgtcaaaggaaagggcaaagttgaggaaattgaagaaaataatgaagatgaagaacttgaagctctacatggaaaacaaaaccattattgaagagaatgaaaaattgagaaagcaagctcttcttcttcatcaagaaaacaaagccttgttctctcagatgctaattcaacaagtttctcaaaaccccaattaa

SEQ ID NO: 765 - protein, 109 aa, Capsicum annuum
MCHGVSDLESFQTSCYTDLVHRPDPEPSKTAKAHVVSLRRRNGERLSKERAKLRKLKKIMKMKNLKLYMENKTIIEENEKLRKQALLLHQENKALFSQMLIQQVSQNPN

SEQ ID NO: 766 - DNA, 336 bp, Cichorium intybus
atgtgtctttgtacctccaaaggctatgatccttcacatctcactaccggagaacaactcaagagatcaaactttgactttcaccatctacaaaggaaaagaattatgggtatgaaaaatccacgaaacaaaacaagggtcttgtttgtaatgttgaaaaggaagatggcaatgaagaatttgaagttgtacattcaaaaccaatgcataattgaagagaatgagaggcttagaagaaaagcacttcttctccatcaagaaaaccaagtattgctttgtcaactccaaaacgtcaaaattaacccacaaaacatcaacaccgatgtcatagtctag

SEQ ID NO: 767 - protein, 111 aa, Cichorium intybus
MCLCTSKGYDPSHLTTGEQLKRSNFDFHHLQRKRIMGMKNPRNKTRVLFVMLKRKMAMKNLKLYIQNQCIIEENERLRRKALLLHQENQVLLCQLQNVKINPQNINTDVIV

SEQ ID NO: 768 - DNA, 351 bp, Cucumis melo
atgtgccattcttcccgattcatcctcactccttcctatttagcctgccgccaccatcgacggcggcgccccgttcgagtttacagcctcttgagaaggatgagattcgcaacggaagaagcgaattcggccggcgttaaggtagaaatggagatcaagaatttgaaactgtatatggagaatcaaagcattattgaagagaacgagagattgagaaagaaagcgtttcttcttcacaaagagaatcaggttttgttatctcagcttcagaatttctccgactataaaccaccgcagtctagctccgatttgagtgcctgcagttgggaaagtaaacaaaatcatctgtag

SEQ ID NO: 769 - protein, 116 aa, Cucumis melo
MCHSSRFILTPSYLACRHHRRRRPVRVYSLLRRMRFATEEANSAGVKVEMEIKNLKLYMENQSIIEENERLRKKAFLLHKENQVLLSQLQNFSDYKPPQSSSDLSACSWESKQNHL

SEQ ID NO: 770 - DNA, 303 bp, Citrus sinensis
atgactccatctctatgcagtggttgcttattgcattttgcttatagacgcccatgtcgacgacacaattttcgggtacgccgcttaaatagggggagaagattatcatcagcattaaacgagacgatggagctaaagagaaagaacctgaagctgtacatggagaaccagagcctcatcaaagagaatgaaaagctgagaaacaaagctcttcttcttcaccaagagaatcaggcgttgttatctcagtcactattcaacttacgattaattagttcgatccctcttccctttttcccctaa

SEQ ID NO: 771 - protein, 100 aa, Citrus sinensis
MTPSLCSGCLLHFAYRRPCRRHNFRVRRLNRGRRLSSALNETMELKRKNLKLYMENQSLIKENEKLRNKALLLHQENQALLSQSLFNLRLISSIPLPFFP

SEQ ID NO: 772 - DNA, 231 bp, Carthamus tinctorius
atgggtaagaaaaatccacgaaacaagaagaaggtcttgtttttcgtgttgaaaagaaagatggcaatgaagaacttgaagttgtatatgcaaaaccaatgcatgattgaagaaaatgagaagcttagaagaaaagcacttgttcttcatcaagaaaaccaaatcttgttttctcaactccaaaatgccaaaattaaccaacacaatatcaacaataatgccatagtctag

SEQ ID NO: 773 - protein, 76 aa, Carthamus tinctorius
MGKKNPRNKKKVLFFVLKRKMAMKNLKLYMQNQCMIEENEKLRRKALVLHQENQILFSQLQNAKINQHNINNNAIV

SEQ ID NO: 774 - DNA, 303 bp, Eragrostis tef
atgtgctccggctcctggaacagcaagaaacaccagccttttctcgtcctcaaacagcagcggaagcctcatgtctcggttgttatcaggaggaagaggttgagactgaggtggcgagctggggcagagaccatggagatggtgaacttgaagctctacctcgagaaccggtgcatcatcgcggagaacgagaggctccgggagaaggccaacgcgctccgccgcgagaacctcgcgctgagggagaacctgtccaagacggtggccgctgagctgccggcggcaggagcaagagctgcctga

SEQ ID NO: 775 - protein, 100 aa, Eragrostis tef
MCSGSWNSKKHQPFLVLKQQRKPHVSVVIRRKRLRLRWRAGAETMEMVNLKLYLENRCIIAENERLREKANALRRENLALRENLSKTVAAELPAAGARAA

SEQ ID NO: 776 - DNA, 327 bp, Euphorbia tirucalli
atgtgttttattacctcatcttcaacactctgcccatacagttctttaatccttgctgctgccaatacgaaaccatcaagaggctttaatgtccaatatcgccggctaagcaggagaagaagagtatcaagagaagcaaagaagaaaaacaaaatgggttcagtaaatatacaaaatgagatgaaaataaagaacttgaagctttatatggagaacaaaagcatcattcaagagaatgagaaactaaggaagaaagctcttctccttcaccaagagaaccaagctttgctctttcagctcaaaaacaatttctctaagaatttttga

SEQ ID NO: 777 - protein, 108 aa, Euphorbia tirucalli
MCFITSSSTLCPYSSLILAAANTKPSRGFNVQYRRLSRRRRVSREAKKKNKMGSVNIQNEMKIKNLKLYMENKSIIQENEKLRKKALLLHQENQALLFQLKNNFSKNF

SEQ ID NO: 778 - DNA, 297 bp, Gossypium hirsutum
atgttggttaactcttcttcatgctgccgaaaacgtcagtccaagctaagacataacgttcgtgttccaaggctcaacaggttgagaagattaaggacaaagaagatgggggccgtcgggattaaaacagatatggaaataaaaaacttgaaactgtacatggagaatcagattatcatacaagagaacaagaagctgaggaagaaagcacttcttcttcaccaggagaaccaaaccctgttggctcagctacagaagaagttgtgtaatccgccgaatcagtccttaaaaacctag

SEQ ID NO: 779 - protein, 98 aa, Gossypium hirsutum
MLVNSSSCCRKRQSKLRHNVRVPRLNRLRRLRTKKMGAVGIKTDMEIKNLKLYMENQIIIQENKKLRKKALLLHQENQTLLAQLQKKLCNPPNQSLKT

SEQ ID NO: 780 - DNA, 330 bp, Gossypium hirsutum
atgtgtaaaaacatggattggagtccatacccatctcatcccaccattgcttcttcaaagagaaggcatagattaaaacattctaaggttcaagtctacaggctttccaggaaaagatgggaagaaaatatgaagaaagacatggacctaatgaacttgaagctgtacttggagaaccaaagtatcattgaagagaatgagaagttaaggaagaaagccagtcttctccatcaagagaacttagctttaatgtctgagtaccagaagaagtttcctcatttagatcgtttttcaaccacccttttgcttcttctgcaacaaaaacactga

SEQ ID NO: 781 - protein, 109 aa, Gossypium hirsutum
MCKNMDWSPYPSHPTIASSKRRHRLKHSKVQVYRLSRKRWEENMKKDMDLMNLKLYLENQSIIEENEKLRKKASLLHQENLALMSEYQKKFPHLDRFSTTLLLLLQQKH

SEQ ID NO: 782 - DNA, 324 bp, Gossypium hirsutum
atgtgtaacaacatgaattggagcccatctcatcccatcttagtttcttcaaagagaaggcatagatcaaaacaaagtaaagttcaaatctacaggctttccaggaaaaggtgtgaagaagaagatgtgaagaaagacatggaactaatgaacttgaagctgcatttggagaatcgaagcattatagaagagaatgagaagttaaggaagagagctaatcttctacatcaagagaacttggctttaatgtctgagcttcagaacaagtttcctcatttggatcgtttttccactacccttttggttcttctgcaaaaacactga

SEQ ID NO: 783 - protein, 107 aa, Gossypium hirsutum
MCNNMNWSPSHPILVSSKRRHRSKQSKVQIYRLSRKRCEEEDVKKDMELMNLKLHLENRSIIEENEKLRKRANLLHQENLALMSELQNKFPHLDRFSTTLLVLLQKH

SEQ ID NO: 784 - DNA, 324 bp, Gerbera hybrid cultivar
atgtgcacaaacaaaagcaacatctcaaaatgcatctcatcaacttctctcaattttcgtacccataaaaacaaatttaaacgggctctaattcggatacagattcggattcataggttcaaacgggcgcacaagtttatcgatgaaaagatcaaacgagagatggagctcaagaacttgaagttgtacatggagaacatgagtatcttgaaagagaacgagaaattgaggaagaaagcgagcctactccatcaagaaaacctcgttttactgtcagagctcaagaaaaagtcgtcacctttacaagaatctttgagttcatga

SEQ ID NO: 785 - protein, 107 aa, Gerbera hybrid cultivar
MCTNKSNISKCISSTSLNFRTHKNKFKRALIRIQIRIHRFKRAHKFIDEKIKREMELKNLKLYMENMSILKENEKLRKKASLLHQENLVLLSELKKKSSPLQESLSS

SEQ ID NO: 786 - DNA, 339 bp, Glycine max
atgtgttctttctcttcagaacagttaccttatctttttcttggttttgcccttcaccctccatggccatccaagagacagcaccagcaccttcggttgaacatccataaaagaaggagagcacaattgcaagaagcaagacggaggaagaggatgatcatcttgaagcttacagaaataaagatgagaaacttgaagttgtacatggagaaccaaagcatcatagaggagaatcagaagttgaggaagcaagcaatgcttcttcacaaagagaatgatgtcctcttatttcagcttcaaaagaagctttccgaacaaaacaacagcaaaaccaattaa

SEQ ID NO: 787 - protein, 112 aa, Glycine max
MCSFSSEQLPYLFLGFALHPPWPSKRQHQHLRLNIHKRRRAQLQEARRRKRMIILKLTEIKMRNLKLYMENQSIIEENQKLRKQAMLLHKENDVLLFQLQKKLSEQNNSKTN

SEQ ID NO: 788 - DNA, 336 bp, Glycine max
atgtgctctatctcttcaaaacagaccctttatttggttcttcctcgtccatggccatctaaaagacaccaccacaaccacaggcaccttcggttgggcatgctcaacagaaggagggcacacttgaaagaagcaagacaaaggaaaaggattgttgtggtgaaatcagagattcagatgaagaacttgaaactgtacatggagaaccaaaccatcatagaggagaatgagaagttgaggaaacaagccatgcttctgcacaaagagaatcaggcactcttgtctcagctccaaaagaagctttcagaacaaaacaacaataccaacaataactag

SEQ ID NO: 789 - protein, 111 aa, Glycine max
MCSISSKQTLYLVLPRPWPSKRHHHNHRHLRLGMLNRRRAHLKEARQRKRIVVVKSEIQMKNLKLYMENQTIIEENEKLRKQAMLLHKENQALLSQLQKKLSEQNNNTNNN

SEQ ID NO: 790 - DNA, 333 bp, Glycine max
atgtgctctttctcttcaaaacaaaccctttatttggcacttcctcgtccatggacatctaaaagacaccaccacagtcacaggcaccttcggttgggcatgctcaacagaaggagggcaaacttgaaagaagccagacaaaggaaaaggattgttgtgaaatcagagattcagatgaagaacttgaagttgtacatggagaaccaaaccatcatagaggagaatgagaagttgaggaaacaagccatgcttctgcacaaagagaatcaggccctctcgtctcagctccaaaagaagctttctggacaaaacaacaataccaacaataactag

SEQ ID NO: 791 - protein, 110 aa, Glycine max
MCSFSSKQTLYLALPRPWTSKRHHHSHRHLRLGMLNRRRANLKEARQRKRIVVKSEIQMKNLKLYMENQTIIEENEKLRKQAMLLHKENQALSSQLQKKLSGQNNNTNNN

SEQ ID NO: 792 - DNA, 234 bp, Glycine max
actaagatgcaacctaaaaaaaaaaagaagaagctaagtcaacaagatatagggctaacataacatttgagaaaaagatcattgacacagaccctttaatttctcctaccccttgccacactatgacacaaataaactgtttatatattaattagctaatagctagttattgttggtattgttgttttgtcctgaaagcttcttttggagctgagacgagagggcctgattctc

SEQ ID NO: 793 - protein, 77 aa, Glycine max
  misc_feature (36)..(36): Xaa can be any naturally occurring amino acid
MLTRRRAHLKEPRQRKRIVVKSEIQMKNLKLYMENXPIIEENEKLRKQAMLLHKENQALSSQLQKKLSGQNNNTNNN

SEQ ID NO: 794 - DNA, 351 bp, Glycine max
atgtgctctttctcttcagaacagtcctcaccatatgatgatcttcctcttgttcaccctccatggccatccaagagacagccccagcaccttcggttcagcctccataaaagaaggagagcacaattgcaagaagcaagacggaggaaaaggatgatcatattgaagactgaaataaagatgagaaacttgaagttgtacatggagaaccaaagcatcatagaggagaatgagaagttaaggaagcaagcagtgcttcttcacaaagagaatgaggccctcttatttcaacttcaaaagaagctttccgaacaaaataacagcaaaaccaatcaaatagctgttagctag

SEQ ID NO: 795 - protein, 116 aa, Glycine max
MCSFSSEQSSPYDDLPLVHPPWPSKRQPQHLRFSLHKRRRAQLQEARRRKRMIILKTEIKMRNLKLYMENQSIIEENEKLRKQAVLLHKENEALLFQLQKKLSEQNNSKTNQIAVS

SEQ ID NO: 796 - DNA, 336 bp, Glycine max
atgtgctctttctcttcaaaactgaccctttatttggttcttcctcgtccatggccatctaaaagacaccaccacaaccacaggcaccttcggttgggcatgctcaacagaaggagggcacacttgaaagaagcaagacaaaggaaaaggattgttgtggtgaaatcagagattcagatgaagaacttgaaactgtacatggagaaccaaaccatcatagaggagaatgagaagttgaggaaacaagccatgcttctgcacaaagagaatcaggcactcttgtctcagctcctaaagaagctttctgaacaaaactactataccaactataactag

SEQ ID NO: 797 - protein, 111 aa, Glycine max
MCSFSSKLTLYLVLPRPWPSKRHHHNHRHLRLGMLNRRRAHLKEARQRKRIVVVKSEIQMKNLKLYMENQTIIEENEKLRKQAMLLHKENQALLSQLLKKLSEQNYYTNYN

SEQ ID NO: 798 - DNA, 333 bp, Glycine max
atgtgctctttctcttcaaaacagaccctttatttggcacttcctcgtccatggacatctaagagacaccaccacagtcacaggcaccttcggttgggcatgctcaacagaaggagggcacacttgaaagaagcaagacaaaggaaaaggattgttgtgaaatcagagattcagatgaagaacttgaagttgtacatggagaaccaaaccatcatagaggagaatgagaagttgaggaaacaagccatgcttctgcacaaagagaatcaggccctctcgtctcagctccaaaagaagctttcaggacaaaacaacaataccaacaataactag

SEQ ID NO: 799 - protein, 110 aa, Glycine max
MCSFSSKQTLYLALPRPWTSKRHHHSHRHLRLGMLNRRRAHLKEARQRKRIVVKSEIQMKNLKLYMENQTIIEENEKLRKQAMLLHKENQALSSQLQKKLSGQNNNTNNN

SEQ ID NO: 800 - DNA, 351 bp, Lactuca perennis
atgtgtcttggcacccccaaagaaaacatatatcgtctttcatatctcacaactcaccaagaacaactcaagagatcatcaagctttcacttccaccatctacaaagcaggaaaagagttatgggtatgaagaattcacgaaacaaaacaagggtcttgtttgtaatgctgaaaaggaagatggcaatgaagaacttgaagttgtacatgcaaaaccaattcataattgaagagaatgagaagcttagaagaaaagcacttcttctccatcaagaaaaccaagtcttgttttatcaactccaaaatgtcaaaattaacaaacacaacattgacactgatgtcgtagtctag

SEQ ID NO: 801 - protein, 116 aa, Lactuca perennis
MCLGTPKENIYRLSYLTTHQEQLKRSSSFHFHHLQSRKRVMGMKNSRNKTRVLFVMLKRKMAMKNLKLYMQNQFIIEENEKLRRKALLLHQENQVLFYQLQNVKINKHNIDTDVVV

SEQ ID NO: 802 - DNA, 294 bp, Lactuca sativa
atgtacacatataactcaaaatgtgtctcatcgcctcttcttagttcccctacccggaaaatgaagtcaaatcgtgttcgaaaacacatacaagttcgacttcataggtttaacagacgcatcaatgaaaagatgaaacaggagatggagttcaaaaacttgaagttgtatatggagaacatgaacatcttgaaagaaaacgcagaactgtggaagaaagcaatccaactccgtgaagaaaatactattttactgtctaagcttgtgaaaaatatcaagccttcgggttcgtga

SEQ ID NO: 803 - protein, 97 aa, Lactuca sativa
MYTYNSKCVSSPLLSSPTRKMKSNRVRKHIQVRLHRFNRRINEKMKQEMEFKNLKLYMENMNILKENAELWKKAIQLREENTILLSKLVKNIKPSGS

SEQ ID NO: 804 - DNA, 417 bp, Lactuca serriola
atgtgtactagcaataccacagaatgcatgtcaccaccttcatactatttcctcaaccaaaaaacaaaatcaaagcaagccaagtttcgtatgaggaatcaggttcgaatacataggcttaacaggtacatatatatattatgctttttgtgggtcttattaacgtttatcttctttctatcaataggattaataatcttatttgagtgtggttttctttcttttgtgtgttttagggttgataagtttattgaagaaaagatcaagcaagagatggagttgaagaacttgaagttgtacatggagaacatgagcattttggaagagaatgagaggctgaggaacaaagccaccatgcttcatcaagaaaatcttgctttattatctcttttggagaacaaaaggttcaacctttga

SEQ ID NO: 805 - protein, 138 aa, Lactuca serriola
MCTSNTTECMSPPSYYFLNQKTKSKQAKFRMRNQVRIHRLNRYIYILCFLWVLLTFIFFLSIGLIILFECGFLSFVCFRVDKFIEEKIKQEMELKNLKLYMENMSILEENERLRNKATMLHQENLALLSLLENKRFNL

SEQ ID NO: 806 - DNA, 306 bp, Lactuca serriola
atgtgtactagcaataccacagaatgcatgtcaccaccttcatactatttcctcaaccaaaaaacaaaatcaaagcaagccaagtttcgtatgaggaatcaggttcgaatacataggcttaacagggttgataagtttattgaagaaaagatcaagcaagagatggagttgaagaacttgaagttgtacatggagaacatgagcattttggaagagaatgagaggctgaggaacaaagccaccatgcttcatcaagaaaatcttgctttattatctcttttggagaacaaaaggttcaacctttga

SEQ ID NO: 807 - protein, 101 aa, Lactuca serriola
MCTSNTTECMSPPSYYFLNQKTKSKQAKFRMRNQVRIHRLNRVDKFIEEKIKQEMELKNLKLYMENMSILEENERLRNKATMLHQENLALLSLLENKRFNL

SEQ ID NO: 808 - DNA, 294 bp, Lactuca virosa
atgtgcacatataactcaaaatgtgtctcatcgcctcttcctagttcccctatccggaaaatgaagtcaaatcgtcttcgaaaacacatacaagttcgacttcataggtttaacagacgcatcaatgaaaagatgaaacaggagatggagttcaaaaacttgaagttgtatatggagaacatgaacatcttgaaagaaaacgcagaactgtggaagaaagcaatccaactccgtgaagaaaatactgttttactgtctgagctcgcgaaaaaaatcaagccttcgggttcgtga

SEQ ID NO: 809 - protein, 97 aa, Lactuca virosa
MCTYNSKCVSSPLPSSPIRKMKSNRLRKHIQVRLHRFNRRINEKMKQEMEFKNLKLYMENMNILKENAELWKKAIQLREENTVLLSELAKKIKPSGS

SEQ ID NO: 810 - DNA, 339 bp, Malus x domestica
atgtgtttgaactcagaattgtctccgtctagtcctctatactcttcttttcaccttcgaaggccatcaaagcaacacagctttcgagttcgccgcctaattaacaggaactggaagagaaaaccagctggaccagcagcaaaagaggcagagaccggaggggcaaaggtagagatggaaatgaagaacttgaagctgtatatggagaaccagagcattatagaagagaatactaagctgaggagaaaagcacttcttcttgtccaagaaaaccaagccttgttttcacagctccaacaaaagcagctttttctcaacaaaacaacagcagcagtataa

SEQ ID NO: 811 - protein, 112 aa, Malus x domestica
MCLNSELSPSSPLYSSFHLRRPSKQHSFRVRRLINRNWKRKPAGPAAKEAETGGAKVEMEMKNLKLYMENQSIIEENTKLRRKALLLVQENQALFSQLQQKQLFLNKTTAAV

SEQ ID NO: 812 - DNA, 333 bp, Nicotiana tabacum
atgtgccatgcatgcgcaacatcacagttagagtcatttcagccctcatgctacactgatttccacagtccacagttgtctaaaacagccaagatacatgtgctcaagctaagaaggaatggtggcagattgtcaaaggaagcaaaggaaaggacaaggttgaggaaattgaagaaagcaatgaagatgaagaacttgaagctctacaaagagaacaaaaccataattgaagagaatgaaaggttgcgcaaaaaagctcttcttcttcatcaagaaaacaaagccttgttctctaagcttcaacaagtttttcaatcacccaaccacgactaa

SEQ ID NO: 813 - protein, 110 aa, Nicotiana tabacum
MCHACATSQLESFQPSCYTDFHSPQLSKTAKIHVLKLRRNGGRLSKEAKERTRLRKLKKAMKMKNLKLYKENKTIIEENERLRKKALLLHQENKALFSKLQQVFQSPNHD

SEQ ID NO: 814 - DNA, 351 bp, Oryza sativa
atgtgttctggctcctggaacagcaagaataagatctatctgtctttggttgtattcaggcaggacaatcaacagcagcagcagagaaagcagccggctcatgcccccatggctctcaggaggaagaggctaaggctgaggaggaggagagagaccatgaggagatctgatggaatggagatggagatggtgaacctgaagctctacctggagaacaggtgcatcctggaggagaacgagaggctgagggagaaggccagcgcgctccaccgggagaacctcgcgctgcgcgccgacctgcgcaacacatcgtcgccggcgacgacggcggccgccgcctccagctgctga

SEQ ID NO: 815 - protein, 116 aa, Oryza sativa
MCSGSWNSKNKIYLSLVVFRQDNQQQQQRKQPAHAPMALRRKRLRLRRRRETMRRSDGMEMEMVNLKLYLENRCILEENERLREKASALHRENLALRADLRNTSSPATTAAAASSC

SEQ ID NO: 816 - DNA, 351 bp, Oryza sativa; identical to SEQ ID NO: 814

SEQ ID NO: 817 - protein, 116 aa, Oryza sativa; identical to SEQ ID NO: 815

SEQ ID NO: 818 - DNA, 399 bp, Picea abies
atgccgttagataacatttggacagtctcgagttcgagtcgccgaagacccgcgcaaaggctttggtttggccgcgagcaggttgttttgggccaatttctccagcggcgttcgttctccataaagcaacgtattaaaaggcgtccgattttgtactctttggctcctagggcggccaaagcgtggcttgcgttcagaagaaggtcgaagaggaagatagacaaagaggcttctcgcattgagaggttaaatttacagctttttcaacggaatcagtgcatcgtagaagaaaatgaaagactgaggaaacaggctttactactaactgaggagaatcaacttctacagcagaagctgcaagagcaacttaggtgtccagacaaagtcttgggagcctaa

SEQ ID NO: 819 - protein, 132 aa, Picea abies
MPLDNIWTVSSSSRRRPAQRLWFGREQVVLGQFLQRRSFSIKQRIKRRPILYSLAPRAAKAWLAFRRRSKRKIDKEASRIERLNLQLFQRNQCIVEENERLRKQALLLTEENQLLQQKLQEQLRCPDKVLGA

SEQ ID NO: 820 - DNA, 321 bp, Populus deltoides
atgtgcactaacggagtagacaggatcccttctcctttccaccctttaaagagaaggcaaagatcaaagaaatgtaaggttcaggttattgggctcacctgcaggaggtcaggatatgaggattgggaggagaagaacatggagctaaagaacttgaagctgtatttagagaaccaaagtatagttgaagagaacgagaagctgaggaagaaagctagtcttctccaccaagaaaacctggccttaatgtctgaacttcaaaagaaattccctcatttggatcgcttctccaacaccctacttctcttacacaaacactag

SEQ ID NO: 821 - protein, 106 aa, Populus deltoides
MCTNGVDRIPSPFHPLKRRQRSKKCKVQVIGLTCRRSGYEDWEEKNMELKNLKLYLENQSIVEENEKLRKKASLLHQENLALMSELQKKFPHLDRFSNTLLLLHKH

SEQ ID NO: 822 - DNA, 399 bp, Picea sitchensis
atgccgttagataacatttggacagtctcgagttcgagtcgccgaagacccgcgcaaaggctttggtttggccgcgagcaggttgttttgggccaatttctccagcggcgttcgttctcctttaagcaacgtattaaaaggcgtccgattttgtactctttggctcctagggcggctaaagcgtggcttgcgttcagaagaaggtcgaagaggaagatagacaaagaggcttctcgcattgagaggttaaatttacagctttttcaacggaatcagtgcatcgtagaagaaaatgaaagactgaggaaacaggctttactactaaccgaggagaatcaacttctacagcagaagctgcaagagcaacttaggtgtccagacaaagtcttgggagcctaa

SEQ ID NO: 823 - protein, 132 aa, Picea sitchensis
MPLDNIWTVSSSSRRRPAQRLWFGREQVVLGQFLQRRSFSFKQRIKRRPILYSLAPRAAKAWLAFRRRSKRKIDKEASRIERLNLQLFQRNQCIVEENERLRKQALLLTEENQLLQQKLQEQLRCPDKVLGA

SEQ ID NO: 824 - DNA, 339 bp, Populus tremula
atgtgtactggtacttgttcgaaactgagaccatgcagtcccttgtatattgctcttagcaatcaacagccatcaaaaggacacaaccttcgatatcatagactcaaccgaaggagaaggttgtcgaaagggaagagggtggcacttgtactggtcaagaaagagatggaaatcaagaacttgaaactgttcatggagaacaaaagcatcatcgaagagaatgagaagctgagaaagaaagcatttcttctacaccaggaaaatcaggccttgctttatgagctccaaaagaagcgctctgatcctcgccatgaccacttggctcacagcaacagctaa

SEQ ID NO: 825 - protein, 112 aa, Populus tremula
MCTGTCSKLRPCSPLYIALSNQQPSKGHNLRYHRLNRRRRLSKGKRVALVLVKKEMEIKNLKLFMENKSIIEENEKLRKKAFLLHQENQALLYELQKKRSDPRHDHLAHSNS

SEQ ID NO: 826 - DNA, 321 bp, Populus trichocarpa
atgtgcactaacggagtagacaggatcccttctcctttccacccttcaaagagaaggcaaagatcaaagaaatgtaaggttcaggttattgggctcacctgcaggaggtcaggatatgaggaatgggaggagaagaacatggagctaaagaacttgaagctgtatttagagaaccaaagtattgttgaagagaacgagaagctgaggaagaaagctagtcttctccaccaagaaaacctggccttaatgtctgaacttcaaaagaaattccctcatttggatcgcttctccaacaccctacttctcttacacaaacactag

SEQ ID NO: 827 - protein, 106 aa, Populus trichocarpa
MCTNGVDRIPSPFHPSKRRQRSKKCKVQVIGLTCRRSGYEEWEEKNMELKNLKLYLENQSIVEENEKLRKKASLLHQENLALMSELQKKFPHLDRFSNTLLLLHKH

SEQ ID NO: 828 - DNA, 339 bp, Populus trichocarpa
atgtgtactggtacttgttcgaaactgagcccatgcagtcccttgtatattgctcttagcaatcaacagccatcaaaaggacacaaccttcgatatcatagactcaaccgaaggagaaggttgtcaaaagggaagagggtggcactggtactggtcaagaaagagatggaaatcaagaacttgaaactgtacatggagaataaaagcatcatagaagagaatgagaagctgagaaagaaagcatttcttctacaccaggaaaatcaagctttgctttatcagctccaaaagaagcgctctaatcctcgccatgaccacttggctcacagcaacaactaa

SEQ ID NO: 829 - protein, 112 aa, Populus trichocarpa
MCTGTCSKLSPCSPLYIALSNQQPSKGHNLRYHRLNRRRRLSKGKRVALVLVKKEMEIKNLKLYMENKSIIEENEKLRKKAFLLHQENQALLYQLQKKRSNPRHDHLAHSNN

SEQ ID NO: 830 - DNA, 327 bp, Phaseolus vulgaris
atgtgctctttctcttcagaaaagacaccatatcatccccttgttcttgctcttcaacctccatgcccttccaagagacaccaccaccttcgcttgagcctccataaaagaaggagagcacaagttgaagaaagaagaaggaaaaagatgattttgaagaaagaaatgaagatgagaaacttgaagttgtacatgaagaaccaaagcataattgaggaaaatgagaagttgagaaagcaagcacttcttcttcacaaagagaatgagaccctcttatttgagcttcaaaacaagttctcccaacaaagtaacatcaaaaccaaataa

SEQ ID NO: 831 - protein, 108 aa, Phaseolus vulgaris
MCSFSSEKTPYHPLVLALQPPCPSKRHHHLRLSLHKRRRAQVEERRRKKMILKKEMKMRNLKLYMKNQSIIEENEKLRKQALLLHKENETLLFELQNKFSQQSNIKTK

SEQ ID NO: 832 - DNA, 321 bp, Rosa chinensis
atgtgtaggaactcctcagaaatgattccatacagtcctctgtactcttctttccgcctccgacggccatcaaagcatcacagctttcgcgttcaccgcctaatcaacaggaggagatcaattacaaaagaagcaaaagagaaggagatggaaatcaagaacctgaagttgtacatggagaataagagcataatagaagagaataacaagttgaggagaaaagcacttctccttgtccaagagaatcaagctttgttttcgcagctccaacagaaaatctcagaccatgcatgcagtgctactatgaaacaagatcactaa

SEQ ID NO: 833 - protein, 106 aa, Rosa chinensis
MCRNSSEMIPYSPLYSSFRLRRPSKHHSFRVHRLINRRRSITKEAKEKEMEIKNLKLYMENKSIIEENNKLRRKALLLVQENQALFSQLQQKISDHACSATMKQDH

SEQ ID NO: 834 - DNA, 342 bp, Sorghum bicolor
atgtgctccggctcctcctggtcctggagcagcagcagcagcaagaagcacccgtctcttgttgtcgtcaacctcgagcggcagctgcggaagacgacgacgtctcatgtctcagttgccatcaggagaaagaggctgaggctgaggaggttgaggttgagagccggagcagaggccatggagatgctgaacctgaagctctacctggagaaccggtgcatcctcgccgagaacgagaggctccgggagagggccaccgcgctccgccgcgagaacctcgcgctgctgcagaacctgtccaagacggcggccgtgccagaggcaggagcaggagctgcgtga

SEQ ID NO: 835 - protein, 113 aa, Sorghum bicolor
MCSGSSWSWSSSSSKKHPSLVVVNLERQLRKTTTSHVSVAIRRKRLRLRRLRLRAGAEAMEMLNLKLYLENRCILAENERLRERATALRRENLALLQNLSKTAAVPEAGAGAA

SEQ ID NO: 836 - DNA, 333 bp, Saccharum hybrid cultivar
atgtgctccggctcctggtcctggagcagcagcaagaagcacccgtctcttgttgtcgtcaacctcaagcggcagctgcagaagacgccgccgcctcatgtctcagttgccatcaggagaaagaggttgaggctgaggaggttgagaggcggagcagaggccatggagatactgaacctgaagctctacctggagaaccgttgcattatcgcggagaacgagaggctccgggaaaaggccaccgcactccgccgtgagaacctcgcgctgctccagaacctgtccaagacggcggccgtgccagaggcaggagcgggagctggaactgcgtga

SEQ ID NO: 837 - protein, 110 aa, Saccharum hybrid cultivar
MCSGSWSWSSSKKHPSLVVVNLKRQLQKTPPPHVSVAIRRKRLRLRRLRGGAEAMEILNLKLYLENRCIIAENERLREKATALRRENLALLQNLSKTAAVPEAGAGAGTA

SEQ ID NO: 838 - DNA, 333 bp, Saccharum hybrid cultivar
atgtgctccggctcctggtcctggagcagcagcaagaagcacccgtctcttgttgtcgtcaacctcaagcggcagctgcagaagacgcagccgcctcatgtctcagttgccatcaggagaaagaggttgaggctgaggaggttgagagccggagcagaggccatggagatactgaacctgaagctctacctggagaaccgttgcattatcgcggagaacgagaggctccgggaaaaggccaccgcactccgccgcgagaacctcgcgctgctccagaacctgtccaagacggcggccgtgccagaggcaggagcgggagctggaactgcgtga

SEQ ID NO: 839 - protein, 110 aa, Saccharum hybrid cultivar
MCSGSWSWSSSKKHPSLVVVNLKRQLQKTQPPHVSVAIRRKRLRLRRLRAGAEAMEILNLKLYLENRCIIAENERLREKATALRRENLALLQNLSKTAAVPEAGAGAGTA

SEQ ID NO: 840 - DNA, 348 bp, Solanum lycopersicum
atgtgtataagttcaacagaatggagtaataattcatcacgtcctctttatttttctatgcagaaaaaacaaagaccaaagatatctcgagttcaacttcataggcttgcaaggaagaaaagaggtgaaggaaaagaaactaaggtggatatggaaatgagaaatttgaagctttatatggaaaatatgagtattttagaggaaaatgagaaattgagaaagaaagcaagtcttttacatgaagaaaatattgctttgatgtttgaatttcaaaagaaattttgtaagtttgatagagtctctaacaaagagaccccccatctacccactactaaattgacaaaataa

SEQ ID NO: 841 - protein, 115 aa, Solanum lycopersicum
MCISSTEWSNNSSRPLYFSMQKKQRPKISRVQLHRLARKKRGEGKETKVDMEMRNLKLYMENMSILEENEKLRKKASLLHEENIALMFEFQKKFCKFDRVSNKETPHLPTTKLTK

SEQ ID NO: 842 - DNA, 348 bp, Sorghum propinquum
atgtgctccggctcctcctggtcctggagcagcagcagcagcagcagcaagaagcacccgtctcttgttgtcgtcaacctcgagcggcagctgctgaagacgacgacgtctcatgtctcagttgccatcaggagaaagaggctgaggctgaggaggttgaggttgagagccggagcagaggccatggagatactgaacctgaagctctacctggagaaccggtgcatcctcgccgagaacgagaggctccgggagagggccaccgcgctccgccgcgagaacctcgcgctgctccagaacctgtccaagacggcggccgtggcagaggcaggagcaggagctgcgtga

SEQ ID NO: 843 - protein, 115 aa, Sorghum propinquum
MCSGSSWSWSSSSSSSKKHPSLVVVNLERQLLKTTTSHVSVAIRRKRLRLRRLRLRAGAEAMEILNLKLYLENRCILAENERLRERATALRRENLALLQNLSKTAAVAEAGAGAA

SEQ ID NO: 844 - DNA, 348 bp, Solanum tuberosum
atgtgtataagttcaacagaatggagtaataattcatcacgtcctctttatttttctatgcagaaaaaacaaagaccaaagatctctcgagttcaacttcataggcttgcaaggaggaaaagaagtgagggaaaagaaactaaggtggatgtggaaatgagaaatttgaagctttatatggaaaatatgagtattttacaggaaaatgagaaattgagaaagaaagcaagtcttttacatgaagaaaatattgctttgatgactgaatttcaaaagaaattttctaagtttgatagagtctctaccaaagagaccccccatctacccactactaaattgacaaaataa

SEQ ID NO: 845 - protein, 115 aa, Solanum tuberosum
MCISSTEWSNNSSRPLYFSMQKKQRPKISRVQLHRLARRKRSEGKETKVDVEMRNLKLYMENMSILQENEKLRKKASLLHEENIALMTEFQKKFSKFDRVSTKETPHLPTTKLTK

SEQ ID NO: 846 - DNA, 345 bp, Solanum tuberosum
atgtgtcatgcagtttctgatcatttagagtcatttcaaccttcatgttacactgacctagtccacaggccacaaacatctaaaacaaccaagatacatgtgctcaagctaagaagaaggaacggtgaaagattgtcgaacgaagcaaagaaaagggcaaagttaaggaaattgaagaaactaatgaagatgaagaacttgaagctctacaaagagaacaaaatcattattgaagagaatgaaaagttgcgcaaaagagctcttcttcttcatcaagaaaacaaagccatgttcactcaaattattcaacaaatttctcaaccctctaataatcacaattattaa

SEQ ID NO: 847 - protein, 114 aa, Solanum tuberosum
MCHAVSDHLESFQPSCYTDLVHRPQTSKTTKIHVLKLRRRNGERLSNEAKKRAKLRKLKKLMKMKNLKLYKENKIIIEENEKLRKRALLLHQENKAMFTQIIQQISQPSNNHNY

SEQ ID NO: 848 - DNA, 315 bp, Theobroma cacao
atgtgtaacaacatggattggagcccaaccatctctgcttcttcaaagagaaggcatagatcaaaacaatctaaagttcaaatttacaggctttccaggaaaagatgcgaagaaaatgtggagaaagacatggaacgactgaacttgaagctctacttggagaaccaaagtattattgaagagaatgagaagttaagaaagaaagccaatcttctccatcaagaaaacttagccttaatgtctgattttcagaagaagtttcctcatttggatcgtttttccaccacccttttgcttcttctgcgaaatcactga

SEQ ID NO: 849 - protein, 104 aa, Theobroma cacao
MCNNMDWSPTISASSKRRHRSKQSKVQIYRLSRKRCEENVEKDMERLNLKLYLENQSIIEENEKLRKKANLLHQENLALMSDFQKKFPHLDRFSTTLLLLLRNH

SEQ ID NO: 850 - DNA, 321 bp, Theobroma cacao
atgtgcatgatctcttcagagtcgatcccaagccgttccctgtattccttctaccggaaacgtccttccaagcgacataacgttcttgttcgaagactcaacaggtggagaaggttgaggaagggagcgggaacaaagaaggtggtcgtcggcgttcaaacagatatgcaaatgaagaacttgaaactgtacatgcagaaccaaatcatcatagaagagaatgagaggctgaggaagaaagctattctcctccaccaggagaaccaaaccctgttggctcagctacagaagaagctctccaatccccaaaattcctcctaa

SEQ ID NO: 851 - protein, 106 aa, Theobroma cacao
MCMISSESIPSRSLYSFYRKRPSKRHNVLVRRLNRWRRLRKGAGTKKVVVGVQTDMQMKNLKLYMQNQIIIEENERLRKKAILLHQENQTLLAQLQKKLSNPQNSS

SEQ ID NO: 852 - DNA, 321 bp, Taiwania cryptomerioides
atgtgggttaaaaggattgatagcttgtcaaacgcaaagcgacgcagggtgggacaaaggctgtggttgataagtgctgttgataagagacaccccactttgtcttcagtcaaggcatgggttgtttgcagaagaagggttaagaggacgtctgacaaagaggctttgcgcattcaaaggttaaacttacagctttatgaacggaatcagagtattgtgcaagaaaatgaaaggctgaggaaacaggctttacttctcagcgaggagaatcagaatctacagcagaagctgcaagagcaaattagcatgcccgaacaatag

SEQ ID NO: 853 - protein, 106 aa, Taiwania cryptomerioides
MWVKRIDSLSNAKRRRVGQRLWLISAVDKRHPTLSSVKAWVVCRRRVKRTSDKEALRIQRLNLQLYERNQSIVQENERLRKQALLLSEENQNLQQKLQEQISMPEQ

SEQ ID NO: 854 - DNA, 273 bp, Triphysaria sp.
atgtgtcaaggatcgaatactcgattgatacaagcacacaaacttcgtttcttcccaagaagagataaacgaacgtgtgttcgtgttctcgggctatcaagaagggacgaaaagatggacaagaacatggaagagaagaacatgaagctatacatggagaacatgagcatattgctagaaaatgagaagttgaggcgccaagctaatctccttcaccaagagagacttgctttaatatctcagtttcaaaatagatttcccgatgataaatga

SEQ ID NO: 855 - protein, 90 aa, Triphysaria sp.
MCQGSNTRLIQAHKLRFFPRRDKRTCVRVLGLSRRDEKMDKNMEEKNMKLYMENMSILLENEKLRRQANLLHQERLALISQFQNRFPDDK

SEQ ID NO: 856 - DNA, 300 bp, Vitis vinifera
atgtgtatgagcactgcagagtggatcccatctcgacctcgaaccaagagatctaaggttcaagttcacaggcttaccaggaggagaagatgtgaagtacaggttgagaaggatatggaactgaagaacttgaagctgtatttggagaataggaatatcatggaagagaatgagaaactgaggaagaaggctacccttctccaccaagagaatctagctttgatgtctgagtttcagaccaaattccctcatttcaaccgcttctccaccaccctctttcttgttcttaacaaacagtga

SEQ ID NO: 857 - protein, 99 aa, Vitis vinifera
MCMSTAEWIPSRPRTKRSKVQVHRLTRRRRCEVQVEKDMELKNLKLYLENRNIMEENEKLRKKATLLHQENLALMSEFQTKFPHFNRFSTTLFLVLNKQ

SEQ ID NO: 858 - DNA, 252 bp, Vitis vinifera
atgcttgttttgtttgtatggatgagatctagaagaaccagaaaagaatcaaaagacaaggccatgatggtggtgggggtgaagtcagagatggagataaagaactggaagctctacatgttgaaccaaagcatcatacaagagaatgaaaagctgagaatgaaagctcttcttcttcatcaagaaaaccaagccttgctatctcagcttcaaaataagttcaaaacctctcctcacaacaacaatcactaa

SEQ ID NO: 859 - protein, 83 aa, Vitis vinifera
MLVLFVWMRSRRTRKESKDKAMMVVGVKSEMEIKNWKLYMLNQSIIQENEKLRMKALLLHQENQALLSQLQNKFKTSPHNNNH

SEQ ID NO: 860 - DNA, 456 bp, Zea mays
atgtgctccggctcctggtcctggagcagcagcaagaagcgcccgtctcttgttgtcgtcaacctcaagcggcagcagctgcagaagacgccgccgccgacgccgcctcgtgcctcagttgctatcaggaggaagaggtacccagctaacccgccctgctcgagtttcccaagcttcctctgctcaagtttcagcagcatcagcgacagtttcctgcaatcacacaagtacactgtacacgtacgcaggctgaggctgaggaggttgagagccggagcagaggccatggagatggtgaacctgaagctctacctggagaaccggtgcatcatcgcggagaacgagaggctgcgggagagggccagcgcgctccgccgcgagaacctcgcgctgctccaggacctgtccaagacgccggccgtgccagaggcaggagcgggagctggagctgcgtga

SEQ ID NO: 861 - protein, 151 aa, Zea mays
MCSGSWSWSSSKKRPSLVVVNLKRQQLQKTPPPTPPRASVAIRRKRYPANPPCSSFPSFLCSSFSSISDSFLQSHKYTVHVRRLRLRRLRAGAEAMEMVNLKLYLENRCIIAENERLRERASALRRENLALLQDLSKTPAVPEAGAGAGAA

SEQ ID NO: 862 - DNA, 327 bp, Zea mays
tgaccgtgttcttatatgaccaaaagagttagttcttgccaacaaaatctagttaatccgcgcacttataatgtacagacaccatggcgcagagcaccccaagagagctccaggaacctggcggtttatgtatgagcagttgagcacagagccacacagacatggcggagcagccaagcagatggcctcctagggctacgagttcactggcctgtctcctgtccacacaagtagcacaagcaccaacgacgagggtgacgcgagctcgctacttcatgttcagcaggcaggcaggcagaggatcgaagcagcaacctcacgcagctc

SEQ ID NO: 863 - protein, 108 aa, Zea mays
MCSGSWFWSSSGSGKEHPSLVVVNLERQLKKTLAVRRRRRLRLRRLRDGGAEAMEMVNLKLYLENRCIIAENERLRERASALRRENLALLQNLSSRTAAVPEPGAGAA

SEQ ID NO: 864 - DNA, 471 bp, Zea mays
atgtgctccggctcctggtcctggagcagcagcaagaagcgcagcgcccgtctcttgttgtcgtcaacctcaagcggcgccagctgcagaagacgccgccgccgacgccacctcgttcctcagttgctatcaggaggaagaggtacccagctaacccgccctgctcgagtttcccaagcttcctttgctcaagtttcagcaccatcagcgacagtttcctgcaatcacacaagtacactgtacacgtacgtacgcaggctgagactgaggaggttgcgagccggagcagaggccatggagatggtgaacctgaagctctacctggagaaccggtgcatcatcgcggagaacgagaagctgcgggagagggccagcgcgctccgccgcgagaacctcgcgctgctccaggacctgtccaagacgccggccgtgccagaggcaggagcgggagcgggagctggagctgcgtga

SEQ ID NO: 865 - protein, 156 aa, Zea mays
MCSGSWSWSSSKKRSARLLLSSTSSGASCRRRRRRRHLVPQLLSGGRGTQLTRPARVSQASFAQVSAPSATVSCNHTSTLYTYVRRLRLRRLRAGAEAMEMVNLKLYLENRCIIAENEKLRERASALRRENLALLQDLSKTPAVPEAGAGAGAGAA

SEQ ID NO: 866 - DNA, 345 bp, Zea mays
atcactggtgcatcgttctgtatccagctctgaatgaagcactgacagctgaagtgcagcgcctgaaacaaatggctggcgaggccagtgatcttcatgtgccgaacggttcgcatcatcatatgaaccgccagattctcgaacagcagctgcagcaggtacagaagcagccatcagaggcccagcaggctcagcagcagcagcagcagccacaggaaccagagcagttcaaagctcagcaaaagcagtggaaccattaagacgattgatttcacagagcacatgcttgaaggtcaaattcatactgcagattcatgaagggataccttgtgttcccggatattc

SEQ ID NO: 867 - protein, 114 aa, Zea mays
MCSGSWSWSSSKKRPSLVVVNLKRQQLQKTPPPTPPRASVAIRRKRLRLRRLRAGAEAMEMVNLKLYLENRCIIAENERLRERASALRRENLALLQDLSKTPAVPEAGAGAGAA

SEQ ID NO: 868 - DNA, 357 bp, Zea mays
atgtgctccggctcctggtcctggagcagcagcaagaagcgcaagcgcccgtctcttgttgtcgtcaacctcaagcggcgccagctgcagaagacgccgccgccgacgccacctcgttcctcagttgctatcaggaggaagaggctgagactgaggaggttgcgagccggagcagaggccatggagatggtgaacctgaagctctacctggagaaccggtgcatcatcgcggagaacgagaagctgcgggagagggccagcgcgctccgccgcgagaacctcgcgctgctccaggacctgtccaagacgccggccgtgccagaggcaggagcgggagcgggagctggagctgcgtga

SEQ ID NO: 869 - protein, 118 aa, Zea mays
MCSGSWSWSSSKKRKRPSLVVVNLKRRQLQKTPPPTPPRSSVAIRRKRLRLRRLRAGAEAMEMVNLKLYLENRCIIAENEKLRERASALRRENLALLQDLSKTPAVPEAGAGAGAGAA

SEQ ID NO: 870 - DNA, 537 bp, Zea mays
atgcgtcgcgcgcgtcaatgcgtgcatgcaccaccaaacaaaaaacctaaagcgaccacccaagccctgaggcgaggcgaggcgaggcgagatctatctttatatatagccttgaagcccttggaacacttcatctccaaattaagtcgccgagctctgaagaatctagctaggagcaggccgcctacgccatcggccgtccacagcaacatgtgctccggctcctggttctggagcagcagcggcagcggcaaggagcacccgtctcttgtcgtcgtcaacctcgagcggcagctaaagaagacgctggccgtcaggagaaggaggaggttgaggctgaggaggttgcgagacggaggagcagaggccatggagatggtgaacctgaagctgtatctggagaaccggtgcatcatcgcagagaacgagaggctccgggagagggccagcgcgctccgccgcgagaacctcgcgctgctccagaacctgtcgtccaggacggcggccgtgccagagccaggagcgggagctgcgtga

SEQ ID NO: 871 - protein, 178 aa, Zea mays
MRRARQCVHAPPNKKPKATTQALRRGEARRDLSLYIALKPLEHFISKLSRRALKNLARSRPPTPSAVHSNMCSGSWFWSSSGSGKEHPSLVVVNLERQLKKTLAVRRRRRLRLRRLRDGGAEAMEMVNLKLYLENRCIIAENERLRERASALRRENLALLQNLSSRTAAVPEPGAGAA

SEQ ID NO: 872 - DNA, 537 bp, Zea mays
atgcgtcgcgcgcgtcaatgcgtgcatgcaccaccaaacaaaaaacctaaagcgaccacccaagccctgaggcgaggcgaggcgaggcgagatctatctttatatatagccttgaagcccttggaacacttcatctccaaattaagtcgccgagctctgaagaatctagctaggagcaggccgcctacgccatcggccgtccacagcaacatgtgctccggctcctggttctggagcagcagcggcagcggcaaggagcacccgtctcttgtcgtcgtcaacctcgagcggcagctaaagaagacgctgaccgtcaggagaaggaggaggttgaggctgaggaggttgcgagccggaggagcagaggccatggagatggtgaacctgaagctgtatctggagaaccggtgcatcatcgcagagaacgagaggctccgggagagggccagcgcgctccgccgcgagaacctcgcgctgctccagaacctgtcgtccaggacggcggccgtgccagagccaggagcgggagctgcgtga

SEQ ID NO: 873 - protein, 178 aa, Zea mays
MRRARQCVHAPPNKKPKATTQALRRGEARRDLSLYIALKPLEHFISKLSRRALKNLARSRPPTPSAVHSNMCSGSWFWSSSGSGKEHPSLVVVNLERQLKKTLTVRRRRRLRLRRLRAGGAEAMEMVNLKLYLENRCIIAENERLRERASALRRENLALLQNLSSRTAAVPEPGAGAA

SEQ ID NO: 874 - DNA, 219 bp, Arabidopsis thaliana
atggagaggctaaactcgaagctgtacttgcaaaactgttatataataaaggagaacgagaggttgaggaagaaagctcagattctgaaccaagagaatcaacaacttctcttcgaactcaaacaaaagctctcgaaaaccaagaactctagtggatcaaatcaaggaaacaacaacaacaacaacaacctctcttcatcaagctctgcttctggataa

SEQ ID NO: 875 - protein, 72 aa, Arabidopsis thaliana
MERLNSKLYLQNCYIIKENERLRKKAQILNQENQQLLFELKQKLSKTKNSSGSNQGNNNNNNNLSSSSSASG

SEQ ID NO: 876 - DNA, 204 bp, Arabidopsis thaliana
atggagaggctaaactcgaagctgtttgttgaaaactgttacataatgaaagagaacgagagactaaggaagaaagctgagcttctgaatcaagagaaccaacagcttttgtttcaactcaaacagaaactctccaaaactaagaactctaacaatggatcaaacaatgacaacaaatcaagctctgcttctggacaatcttga

SEQ ID NO: 877 - protein, 67 aa, Arabidopsis thaliana
MERLNSKLFVENCYIMKENERLRKKAELLNQENQQLLFQLKQKLSKTKNSNNGSNNDNKSSSASGQS

SEQ ID NO: 878 - DNA, 171 bp, Brassica napus
atgtggaggaaggaaaaggagatggagatggaaaatataaggctttacatggagaaccaatacatcatacaagagaatgagaaactcaagaagaaagctcttcttcttcaccaagaaaacaaagctctcttctctcagcttcagaccaaaaaagtttcacatgttccataa

SEQ ID NO: 879 - protein, 56 aa, Brassica napus
MWRKEKEMEMENIRLYMENQYIIQENEKLKKKALLLHQENKALFSQLQTKKVSHVP

SEQ ID NO: 880 - DNA, 207 bp, Helianthus annuus
atggaaaggttgaactcaaagctgtacatggagaactgtctgataatgcaagagaatgagaagttaaggaagaaagcacagattctgaatcaagagaatcaagcattgctctcacagctgaaacagaggataacaatgggtgctcaaaatgggtctcaaaccaccaatggaactcatgcttcttcttctgcgtctaggaacccttga

SEQ ID NO: 881 - protein, 68 aa, Helianthus annuus
MERLNSKLYMENCLIMQENEKLRKKAQILNQENQALLSQLKQRITMGAQNGSQTTNGTHASSSASRNP

SEQ ID NO: 882 - DNA, 279 bp, Hordeum vulgare
atggacaggcttaacgccaagctctacatgcagaactgctacatcctcaaggagaacgaacggctgcgcaagaaggcccagctgctgaaccaggagaaccaggccctgctcagcgagctcaagcagcggctcgccaagaccgcggccagcaaggccaccggcaacggcaacgccggcgccggcgtccgtggggccctccccgacctcaatgcggctccaccggcacacgccgtccatgacaaggcggcgcccaagcccaagaagactgtcgcaaactga

SEQ ID NO: 883 - protein, 92 aa, Hordeum vulgare
MDRLNAKLYMQNCYILKENERLRKKAQLLNQENQALLSELKQRLAKTAASKATGNGNAGAGVRGALPDLNAAPPAHAVHDKAAPKPKKTVAN

SEQ ID NO: 884 - DNA, 248 bp, Lactuca perennis
atggtgttcaaccacctaccggaagcggaaatggaaaggctgaattcaaagctatacatggaaaactatttgataatgcaagagagcgagaaactgaggaagaaagcgtaacttcttaaccaagagaatcaagcattgttgtctcagttgaagcagatgctcacgatgggtagccaaaatgtcaataatgcccctgactccttcgctgacctcagccttaataccaaagctacttcaagtttttgttc

SEQ ID NO: 885 - protein, 82 aa, Lactuca perennis
MVFNHLPEAEMERLNSKLYMENYLIMQESEKLRKKALLNQENQALLSQLKQMLTMGSQNVNNAPDSFADLSLNTKATSSFCS

SEQ ID NO: 886 - DNA, 234 bp, Medicago truncatula
atggaaagattgaacacagagttgtactaccaaaactgtcacataatgaaagagaatgaaaggcttaggaagaaagctcaaattctgaatcaagagaatcaagcacttttgtctcagcttaaacaaaagctctcaaatggtgctggtaactcaaaaaccaatgcaccaaacaacatgcttgaccttaaccttggatcaggttcaagtcaaaatgcttccaattccagcaattag

SEQ ID NO: 887 - protein, 77 aa, Medicago truncatula
MERLNTELYYQNCHIMKENERLRKKAQILNQENQALLSQLKQKLSNGAGNSKTNAPNNMLDLNLGSGSSQNASNSSN

SEQ ID NO: 888 - DNA, 198 bp, Nicotiana tabacum
tgggaagttggttaagagtagtggagcctgtgtcaaattgagaaaatttcttctgaaactgagacattaaactaaggttttcttgatggaggaggcttgccttcttcctcaatttctcattctcctctaaaatgctcatattttccatgtatagcttcaagtttctcatttccatatcctcagctgctttttcctcac

SEQ ID NO: 889 - protein, 65 aa, Nicotiana tabacum
MEMRNLKLYMENMSILEENEKLRKKASLLHQENLSLMSQFQKKFSQFDTGSTTLNQLPIHKQSCQ

SEQ ID NO: 890 - DNA, 300 bp, Oryza sativa
atggacaggctgaacgcgaagctgtacctgcagaactgctacatcatgaaggagaacgagcggctgcgcaagaaggcgctgctgctgaaccaggagaaccaggccttgctcaccgagctcaagcagcggctcgccaagacgaaggcggcggcggcggcggcggccgcgaccaaggctaacggcaacggcaacatgcccgccggcggcggccgcgcgtccctccccgacctcaactcggctccgccggcgcacggccatgacaaggccgtgcccaagtccaagaagacggccgccaagtaa

SEQ ID NO: 891 - protein, 99 aa, Oryza sativa
MDRLNAKLYLQNCYIMKENERLRKKALLLNQENQALLTELKQRLAKTKAAAAAAAATKANGNGNMPAGGGRASLPDLNSAPPAHGHDKAVPKSKKTAAK

SEQ ID NO: 892 - DNA, 297 bp, Oryza sativa
atgaactctgacagtgttagtttgtgtgtgcaggcgatggacagtctgaacacgaagctgtacctgcagaactgctacatgctcaaggagaacgagcggctgcgcaaggcggccgtgcttctcaaccaggagaaccaggccctgctctccgagctcaagcaccgcctcgccaggtcgccgtcgccggccgccgcggcacccggcgtcgccaacgacagcaagaacgccgccgccgccgccggccgccacgctggcccgcctccggtgcaggacaagtcagcctccaagtccaagtag

SEQ ID NO: 893 - protein, 98 aa, Oryza sativa
MNSDSVSLCVQAMDSLNTKLYLQNCYMLKENERLRKAAVLLNQENQALLSELKHRLARSPSPAAAAPGVANDSKNAAAAAGRHAGPPPVQDKSASKSK

SEQ ID NO: 894 - DNA, 246 bp, Oryza sativa
atggagagggtgaacctgaagctgtacctggagaacgtgtacataatggaggagaacgagcggctgcggaggaaggcgcaggcactcaaccaggagaacaaggccctcctcgccaagctcaacaccaaccacgccgccgcctcctcgacgtcgacgacgacccagcaccggccacccaccgccgcctccgcggccggcgccggcgcgtcgtccaccctcaagcccggcaagcagcagccaaagtga

SEQ ID NO: 895 - protein, 81 aa, Oryza sativa
MERVNLKLYLENVYIMEENERLRRKAQALNQENKALLAKLNTNHAAASSTSTTTQHRPPTAASAAGAGASSTLKPGKQQPK

SEQ ID NO: 896 - DNA, 354 bp, Oryza sativa
atgggcattgttcagcctctagtcaaacttgatttgaaagcagtttcaatttcacgcagaagggaaggaagaggatcgatggatcgggtgacgaacctgtacctggagaacctgtgcataatgcaggagaacgagcggctgaggaagaaggcgcagctgctggacaaggagaacaaggcgctcctcgccaagctcaagctcaagaacaacccctccaccgccgccgccgccgccgccgcctcctcgccgtcgtcccagcagcagccagacgccggcgcctcggcggccgccagcgtcgtcaaggccggcgcggcggcgccgtcgtcgtcctatggcgggaagaagaccaagtga

SEQ ID NO: 897 - protein, 117 aa, Oryza sativa
MGIVQPLVKLDLKAVSISRRREGRGSMDRVTNLYLENLCIMQENERLRKKAQLLDKENKALLAKLKLKNNPSTAAAAAAASSPSSQQQPDAGASAAASVVKAGAAAPSSSYGGKKTK

SEQ ID NO: 898 - DNA, 207 bp, Populus trichocarpa
atggaggggaaggacatggagctaaagaacttgaagttgtgtttagagaaccaaagaatcgttgaagagaacgagaagctgaggaagaaagctaatcttctccgccaagaaaacttggccttaatgtctgaatttcaaaagaaattccctcatttggatcgcttatccaccaccctacttcttttacacaacactagcaaaatgtaa

SEQ ID NO: 899 - protein, 68 aa, Populus trichocarpa
MEGKDMELKNLKLCLENQRIVEENEKLRKKANLLRQENLALMSEFQKKFPHLDRLSTTLLLLHNTSKM

SEQ ID NO: 900 - DNA, 234 bp, Populus trichocarpa
atggaaagactgaactccaagctgtacctgcagaactgctacataatgaaagaaaatgagaggctgaggaagaaagcacagcttctcaaccaggagaaccaagcactgttatctgagctgaagcagaaactctccaagcccaactcaaaaggcaattctcccaatgatactatacctgacctcaaccttagctccagttcggccccagatcctgccaattccggctctaactga

SEQ ID NO: 901 - protein, 77 aa, Populus trichocarpa
MERLNSKLYLQNCYIMKENERLRKKAQLLNQENQALLSELKQKLSKPNSKGNSPNDTIPDLNLSSSSAPDPANSGSN

SEQ ID NO: 902 - DNA, 234 bp, Populus trichocarpa; identical to SEQ ID NO: 900

SEQ ID NO: 903 - protein, 77 aa, Populus trichocarpa; identical to SEQ ID NO: 901

SEQ ID NO: 904 - DNA, 246 bp, Rosa hybrid cultivar
atggaaaggctaaactcgaagctgtacttgcagaatgtgtacataatgaaagagaatgagaggctgaggaagaaggcacagcttctgaaccaagagaatcaggcccttctttctgagctgaagcagaagctttcaaagccaaacaaagccaatggtgcttcaaacactgtgcctgatctgaatcttaacctgagctccaccaacaacaacaactcaaacaatcatccttccagttccagcaactga

SEQ ID NO: 905 - protein, 81 aa, Rosa hybrid cultivar
MERLNSKLYLQNVYIMKENERLRKKAQLLNQENQALLSELKQKLSKPNKANGASNTVPDLNLNLSSTNNNNSNNHPSSSSN

SEQ ID NO: 906 - DNA, 333 bp, Sorghum bicolor
atggagaggctgaacacgaagctgtacctgcagaactgctacatcatgaaggagaacgagcggctgcgcaaggcggccctgctgctgaaccaggagaaccaggccctgctctccgagctcaagcaccgcctcgccaagtcctccgccgccggtgctgccgtcgtcggcgggagcaacaacaacaacaacaacaacaacaacaacagcagcaacagctcggcagcggcggtggcgaaccgcgtctcgcccaagcccggcaacgacgccgctccgccgtcttctcatcaggccggcggcaagggcatgcctgccaccaagcccaagcccaagtag

SEQ ID NO: 907 - protein, 110 aa, Sorghum bicolor
MERLNTKLYLQNCYIMKENERLRKAALLLNQENQALLSELKHRLAKSSAAGAAVVGGSNNNNNNNNNNSSNSSAAAVANRVSPKPGNDAAPPSSHQAGGKGMPATKPKPK

SEQ ID NO: 908 - DNA, 315 bp, Sorghum bicolor
atggacagactgaacgcgaagctgtacctgcagaactgcttcatcatgaaggagaacgagcggctgcgcaagaaggcgctgctgctgaaccacgagaaccaggccctgctcaccgagctcaagcagcgcatcgccaaaacggcggcggcggcggccaccaacaacggcaacgccaagtccaacgggaatgtggcggcggcagctggcaaccgcacgccgatcccggacctcaatgcggccgctacaggtccaggggcgcacggcggccacgagaaggcggcgtcgcccaagccaaagaaggcggtcgcgaactga

SEQ ID NO: 909 - protein, 104 aa, Sorghum bicolor
MDRLNAKLYLQNCFIMKENERLRKKALLLNHENQALLTELKQRIAKTAAAAATNNGNAKSNGNVAAAAGNRTPIPDLNAAATGPGAHGGHEKAASPKPKKAVAN

SEQ ID NO: 910 - DNA, 234 bp, Vitis vinifera
atggaaaggctgaactcaaagctgtacttgcagaactgttacataattcaagagaatgagaggctaaggaagaaagcacagcttctcaaccaggagaatcaagcactgctgtctgagctgaagcagaagctctccaaggcaaactcaaaagcaagtgccgcaaacactattccagacctcaacctcagctcctctgcctccaccacatctgctgccaattccactgacccatga

SEQ ID NO: 911 - protein, 77 aa, Vitis vinifera
MERLNSKLYLQNCYIIQENERLRKKAQLLNQENQALLSELKQKLSKANSKASAANTIPDLNLSSSASTTSAANSTDP

SEQ ID NO: 912 - DNA, 171 bp, Zea mays
atggagatggtgaacctgaagctctacctggagaaccggtgcatcatcgcggagaacgagaggctgcgggagagggccagcgcgctccgccgcgagaacctcgcgctgctccaggacctgtccaagacgccggccgtgccagaggcaggagcgggagctggagctgcgtga

SEQ ID NO: 913 - protein, 56 aa, Zea mays
MEMVNLKLYLENRCIIAENERLRERASALRRENLALLQDLSKTPAVPEAGAGAGAA

SEQ ID NO: 914 - DNA, 177 bp, Zea mays
gatgcaccggttctccaggtagagcttcaggttcaccatctccatggcctctgctccggctcgcaacctcctcagtctcagcctgcgtacgtacgtgtacagtgtacttgtgtgattgcaggaaactgtcgctgatggtgctgaaacttgagcaaaggaagcttgggaaactcgagc

SEQ ID NO: 915 - protein, 58 aa, Zea mays
MEMVNLKLYLENRCIIAENEKLRERASALRRENLALLQDLSKTPAVPEAGAGAGAGAA

SEQ ID NO: 916 - DNA, 168 bp, Zea mays
atggagatggtgaacctgaagctgtatctggagaaccggtgcatcatcgcagagaacgagaggctccgggagagggccagcgcgctccgccgcgagaacctcgcgctgctccagaacctgtcgtccaggacggcggccgtgccagagccaggagcgggagctgcgtga

SEQ ID NO: 917 - protein, 55 aa, Zea mays
MEMVNLKLYLENRCIIAENERLRERASALRRENLALLQNLSSRTAAVPEPGAGAA

SEQ ID NO: 918 - DNA, 168 bp, Zea mays
atggagatggtgaacctgaagctgtatctggagaaccggtgcatcatcgcggagaatgagaggctccgggagagggccagcgcgctccgccgcgagaacctcgcgctgctccggaacctgtcgcccaggacggcggccgtgccagagccaggagcgggagctgcgtga

SEQ ID NO: 919 - protein, 55 aa, Zea mays
MEMVNLKLYLENRCIIAENERLRERASALRRENLALLRNLSPRTAAVPEPGAGAA

SEQ ID NO: 920 - DNA, 318 bp, Zea mays
atggacagactgaacgcgaagctgtacctgcagaactgcttcatcatgaaggagaacgagcggctgcgcaagaaggcgctgctgctcaaccaggagaaccaggccctgctcaccgagctcaagcagcggcgcatcgccaaaaccaaaacggcggcgccgcccaaccacagcgccaacgggaatgcggcggcggcagcaggccaccgcgcgccgatcccggacctcaatgccgccgctccgggcccgcgtgcagccggccacgagaaggcggcggcggcggcgtcgcccaacaagccgaagaaggcggtcgccaactga

SEQ ID NO: 921 - protein, 105 aa, Zea mays
MDRLNAKLYLQNCFIMKENERLRKKALLLNQENQALLTELKQRRIAKTKTAAPPNHSANGNAAAAAGHRAPIPDLNAAAPGPRAAGHEKAAAAASPNKPKKAVAN

SEQ ID NO: 922 - DNA, 399 bp, Zea mays
atgtgtcaaaatccagcacaagctcatcacaagctctctgctgccgcccccaccagcaaagcaaggccctcgagtgaccggggcagcgatcgagcggcttccaaccaggcaacaagggcgacgaaggacgatatggacaggctgaacgcgaagctgtacctgcacaactgcttcatcatgaaggagaacgagcggctgcgcaacaaggctctgctgctcaaccaggagaacaaggccttgctcaccgagctcaagcagcgcgtcgccagaacggcggcggcggcggcagcggcaggcaaccacgcgccaacgatcccggacctcaatgccgccgctcctgcaggggcgcacgagaagccggcggcgtcgcccaagccaaagaaggcggtcgcaaactga

SEQ ID NO: 923 - protein, 132 aa, Zea mays
MCQNPAQAHHKLSAAAPTSKARPSSDRGSDRAASNQATRATKDDMDRLNAKLYLHNCFIMKENERLRNKALLLNQENKALLTELKQRVARTAAAAAAAGNHAPTIPDLNAAAPAGAHEKPAASPKPKKAVAN

SEQ ID NO: 924 - DNA, 306 bp, Zea mays
atggacaggctgaacgcgaagctgtacctgcacaactgcttcatcatgaaggagaacgagcggctgcgcaacaaggctctgctgctcaaccaggagaacaaggccttgctcaccgagctcaagcagcgcgtcgccagaacggcggcgacggccaacggcaacggcaacgccaaggccaacgggaatgtggcggcggcggcaggcaaacgcgcgccaacgatcccggacctcaatgccgccgctcctgcaggggcgcacgagaagccggcggcgtcgcccaagccaaagaaggcggtcgcaaactga

SEQ ID NO: 925 - protein, 101 aa, Zea mays
MDRLNAKLYLHNCFIMKENERLRNKALLLNQENKALLTELKQRVARTAATANGNGNAKANGNVAAAAGKRAPTIPDLNAAAPAGAHEKPAASPKPKKAVAN

SEQ ID NO: 926 - DNA, 59 bp, Artificial sequence
  primer: prm15860
ggggacaagtttgtacaaaaaagcaggcttaaacaatgtgtcatgcaatttcagatcat

SEQ ID NO: 927 - DNA, 57 bp, Artificial sequence
  primer: prm15859
ggggaccactttgtacaagaaagctgggtctaattgtgattattagagggttgagaa

SEQ ID NO: 928 - DNA, 2194 bp, Oryza sativa; identical to SEQ ID NO: 247

SEQ ID NO: 929 - protein, 19 aa, Artificial sequence
  motif 8
  VARIANT (3)..(3): / replace = "Lys"
  VARIANT (7)..(7): / replace = "Arg"
  VARIANT (10)..(10): / replace = "Glu"
  VARIANT (11)..(11): / replace = "Arg"
  VARIANT (13)..(13): / replace = "Ser"
  VARIANT (14)..(14): / replace = "Ala"
  VARIANT (16)..(16): / replace = "Arg"
  VARIANT (17)..(17): / replace = "Arg"
IIEENEKLRKKALLLHQEN

SEQ ID NO: 930 - protein, 15 aa, Artificial sequence
  motif 9
  VARIANT (1)..(1): / replace = "Ile"
  VARIANT (3)..(3): / replace = "Lys"
  VARIANT (4)..(4): / replace = "Ile"
  VARIANT (11)..(11): / replace = "Met" / replace = "Leu"
  VARIANT (14)..(14): / replace = "Gln"
  VARIANT (15)..(15): / replace = "Cys" / replace = "Ile"
EMEMKNLKLYEENKS

SEQ ID NO: 931 - protein, 15 aa, Artificial sequence
  motif 10
  VARIANT (1)..(1): / replace = "Lys" / replace = "Leu"
  VARIANT (2)..(2): / replace = "Asp"
  VARIANT (4)..(4): / replace = "Phe"
  VARIANT (5)..(5): / replace = "Thr"
  VARIANT (6)..(6): / replace = "Glu"
  VARIANT (7)..(7): / replace = "Ile"
  VARIANT (8)..(8): / replace = "Ile"
  VARIANT (9)..(9): / replace = "Gln"
  VARIANT (10)..(10): / replace = "Gln"
  VARIANT (11)..(11): / replace = "Ile"
  UNSURE (13)..(13): Xaa can be any naturally occurring amino acid
  UNSURE (15)..(15): Xaa can be any naturally occurring amino acid
QALLSQLQKKLSXPX

SEQ ID NO: 932 - protein, 50 aa, Artificial sequence
  motif 11
  VARIANT (2)..(2): / replace = "Leu"
  VARIANT (3)..(3): / replace = "Ala"
  VARIANT (5)..(5): / replace = "Ile"
  VARIANT (7)..(7): / replace = "Lys"
  VARIANT (15)..(15): / replace = "Glu" / replace = "Leu"
  VARIANT (18)..(18): / replace = "Lys" / replace = "Arg"
  VARIANT (19)..(19): / replace = "Ile" / replace = "Cys"
  VARIANT (21)..(21): / replace = "Leu"
  VARIANT (26)..(26): / replace = "Arg"
  VARIANT (29)..(29): / replace = "Glu"
  VARIANT (30)..(30): / replace = "Arg" / replace = "Gln"
  VARIANT (32)..(32): / replace = "Ser"
  VARIANT (33)..(33): / replace = "Ala"
  VARIANT (35)..(35): / replace = "Arg"
  VARIANT (36)..(36): / replace = "Arg"
  VARIANT (39)..(39): / replace = "Lys" / replace = "Gln"
  VARIANT (40)..(40): / replace = "Asp"
  VARIANT (42)..(42): / replace = "Phe"
  VARIANT (43)..(43): / replace = "Thr" / replace = "Gln"
  VARIANT (44)..(44): / replace = "Ile"
  VARIANT (45)..(45): / replace = "Ile"
  VARIANT (46)..(46): / replace = "Ile"
  VARIANT (47)..(47): / replace = "Gln" / replace = "Asn"
  VARIANT (48)..(48): / replace = "Gln"
  VARIANT (49)..(49): / replace = "Phe"
KVKKEMEMKNLKLYMENQSIIEENEKLRKKALLLHQENLALLSQLQKKIS

SEQ ID NO: 933 - protein, 11 aa, Artificial sequence
  motif 12
  VARIANT (3)..(3): / replace = "Ser"
  VARIANT (4)..(4): / replace = "Gly"
  VARIANT (5)..(5): / replace = "Ile"
  UNSURE (7)..(7): Xaa can be any naturally occurring amino acid
  VARIANT (8)..(8): / replace = "Ser"
  VARIANT (9)..(9): / replace = "Ser"
  VARIANT (10)..(10): / replace = "Ser"
MCHASSXHLES

SEQ ID NO: 934 - protein, 8 aa, Artificial sequence
  motif 13
  VARIANT (1)..(1): / replace = "Ile"
  VARIANT (2)..(2): / replace = "Ser"
  VARIANT (3)..(3): / replace = "Val"
  VARIANT (5)..(5): / replace = "Lys"
  VARIANT (6)..(6): / replace = "Arg"
VHRLNLRR

SEQ ID NO: 935 - DNA, 2798 bp, Artificial sequence
  expression cassette pGOS2::ZPR::tzein
aatccgaaaagtttctgcaccgttttcaccccctaactaacaatatagggaacgtgtgctaaatataaaatgagaccttatatatgtagcgctgataactagaactatgcaagaaaaactcatccacctactttagtggcaatcgggctaaataaaaaagagtcgctacactagtttcgttttccttagtaattaagtgggaaaatgaaatcattattgcttagaatatacgttcacatctctgtcatgaagttaaattattcgaggtagccataattgtcatcaaactcttcttgaataaaaaaatctttctagctgaactcaatgggtaaagagagagattttttttaaaaaaatagaatgaagatattctgaacgtattggcaaagatttaaacatataattatataattttatagtttgtgcattcgtcatatcgcacatcattaaggacatgtcttactccatcccaatttttatttagtaattaaagacaattgacttatttttattatttatcttttttcgattagatgcaaggtacttacgcacacactttgtgctcatgtgcatgtgtgagtgcacctcctcaatacacgttcaactagcaacacatctctaatatcactcgcctatttaatacatttaggtagcaatatctgaattcaagcactccaccatcaccagaccacttttaataatatctaaaatacaaaaaataattttacagaatagcatgaaaagtatgaaacgaactatttaggtttttcacatacaaaaaaaaaaagaattttgctcgtgcgcgagcgccaatctcccatattgggcacacaggcaacaacagagtggctgcccacagaacaacccacaaaaaacgatgatctaacggaggacagcaagtccgcaacaaccttttaacagcaggctttgcggccaggagagaggaggagaggcaaagaaaaccaagcatcctccttctcccatctataaattcctccccccttttcccctctctatataggaggcatccaagccaagaagagggagagcaccaaggacacgcgactagcagaagccgagcgaccgccttctcgatccatatcttccggtcgagttcttggtcgatctcttccctcctccacctcctcctcacagggtatgtgcctcccttcggttgttcttggatttattgttctaggttgtgtagtacgggcgttgatgttaggaaaggggatctgtatctgtgatgattcctgttcttggatttgggatagaggggttcttgatgttgcatgttatcggttcggtttgattagtagtatggttttcaatcgtctggagagctctatggaaatgaaatggtttagggatcggaatcttgcgattttgtgagtaccttttgtttgaggtaaaatcagagcaccggtgattttgcttggtgtaataaagtacggttgtttggtcctcgattctggtagtgatgcttctcgatttgacgaagctatcctttgtttattccctattgaacaaaaataatccaactttgaagacggtcccgttgatgagattgaatgattgattcttaagcctgtccaaaatttcgcagctggcttgtttagatacagtagtccccatcacgaaattcatggaaacagttataatcctcaggaacaggggattccctgttcttccgatttgctttagtcccagaattttttttcccaaatatcttaaaaagtcactttctggttcagttcaatgaattgattgctacaaataatgcttttatagcgttatcctagctgtagttcagttaataggtaatacccctatagtttagtcaggagaagaacttatccgatttctgatctccatttttaattatatgaaatgaactgtagcataagcagtattcatttggattattttttttattagctctcaccccttcattattctgagctgaaagtctggcatgaactgtcctcaattttgttttcaaattcacatcgattatctatgcattatcctcttgtatctacctgtagaagtttctttttggttattccttgactgcttgattacagaaagaaatttatgaagctgtaatcgggatagttatactgcttgttcttatgattcatttcctttgtgcagttcttggtgtagcttgccactttcaccagcaaagttcatttaaatccttagggataggtaaacaatgtgtcatgcaatttcagatcatttagagtcatttcaaccttcatgttacactgacctagtccacaagtcacaaacatctaaaacaaacaagatacatgtgctcaagctaagaagaaggaatggtgaaagattgtccaacgaagcaaagaaaagggcaaagttaagtaaattgaagaaaataatgaagatgaagaatttgaagctctacgaagagaacaaaatcattattgaagagaatgaaaagttacgcaaaagagctcttcttcttcatcaagaaaacaaagacttattcactcaaattattcaacaaatttctcaaccctctaataatcacaattagcctcgagacgcgtgatatcattctcgcccatcacaagccccgatgattgagtaataatgtgtcacgcatcaccatgggtggcagtgtcagtgtgagcaatgacctgaatgaacaattgaaatgaaaagaaaaaaagtactccatctgttccaaattaaaattggttttaaccttttaataggtttatacaataattgatatatgttttctatatatgtctaatttgttatcatcc

SEQ ID NO: 936 - protein, 42 aa, Artificial sequence
  leucine zipper domain of SEQ ID NO: 747
KKIMKMKNLKLYEENKIIIEENEKLRKRALLLHQENKDLFTQ

SEQ ID NO: 937 - DNA, 2889 bp, Artificial sequence
  expression cassette pGOS2::ZPR::terminator
aatccgaaaagtttctgcaccgttttcaccccctaactaacaatatagggaacgtgtgctaaatataaaatgagaccttatatatgtagcgctgataactagaactatgcaagaaaaactcatccacctactttagtggcaatcgggctaaataaaaaagagtcgctacactagtttcgttttccttagtaattaagtgggaaaatgaaatcattattgcttagaatatacgttcacatctctgtcatgaagttaaattattcgaggtagccataattgtcatcaaactcttcttgaataaaaaaatctttctagctgaactcaatgggtaaagagagagattttttttaaaaaaatagaatgaagatattctgaacgtattggcaaagatttaaacatataattatataattttatagtttgtgcattcgtcatatcgcacatcattaaggacatgtcttactccatcccaatttttatttagtaattaaagacaattgacttatttttattatttatcttttttcgattagatgcaaggtacttacgcacacactttgtgctcatgtgcatgtgtgagtgcacctcctcaatacacgttcaactagcaacacatctctaatatcactcgcctatttaatacatttaggtagcaatatctgaattcaagcactccaccatcaccagaccacttttaataatatctaaaatacaaaaaataattttacagaatagcatgaaaagtatgaaacgaactatttaggtttttcacatacaaaaaaaaaaagaattttgctcgtgcgcgagcgccaatctcccatattgggcacacaggcaacaacagagtggctgcccacagaacaacccacaaaaaacgatgatctaacggaggacagcaagtccgcaacaaccttttaacagcaggctttgcggccaggagagaggaggagaggcaaagaaaaccaagcatcctccttctcccatctataaattcctccccccttttcccctctctatataggaggcatccaagccaagaagagggagagcaccaaggacacgcgactagcagaagccgagcgaccgccttctcgatccatatcttccggtcgagttcttggtcgatctcttccctcctccacctcctcctcacagggtatgtgcctcccttcggttgttcttggatttattgttctaggttgtgtagtacgggcgttgatgttaggaaaggggatctgtatctgtgatgattcctgttcttggatttgggatagaggggttcttgatgttgcatgttatcggttcggtttgattagtagtatggttttcaatcgtctggagagctctatggaaatgaaatggtttagggatcggaatcttgcgattttgtgagtaccttttgtttgaggtaaaatcagagcaccggtgattttgcttggtgtaataaagtacggttgtttggtcctcgattctggtagtgatgcttctcgatttgacgaagctatcctttgtttattccctattgaacaaaaataatccaactttgaagacggtcccgttgatgagattgaatgattgattcttaagcctgtccaaaatttcgcagctggcttgtttagatacagtagtccccatcacgaaattcatggaaacagttataatcctcaggaacaggggattccctgttcttccgatttgctttagtcccagaattttttttcccaaatatcttaaaaagtcactttctggttcagttcaatgaattgattgctacaaataatgcttttatagcgttatcctagctgtagttcagttaataggtaatacccctatagtttagtcaggagaagaacttatccgatttctgatctccatttttaattatatgaaatgaactgtagcataagcagtattcatttggattattttttttattagctctcaccccttcattattctgagctgaaagtctggcatgaactgtcctcaattttgttttcaaattcacatcgattatctatgcattatcctcttgtatctacctgtagaagtttctttttggttattccttgactgcttgattacagaaagaaatttatgaagctgtaatcgggatagttatactgcttgttcttatgattcatttcctttgtgcagttcttggtgtagcttgccactttcaccagcaaagttcatttaaatcaactagggatatcacaagtttgtacaaaaaagcaggcttaaacaatgtgtcatgcaatttcagatcatttagagtcatttcaaccttcatgttacactgacctagtccacaagtcacaaacatctaaaacaaacaagatacatgtgctcaagctaagaagaaggaatggtgaaagattgtccaacgaagcaaagaaaagggcaaagttaagtaaattgaagaaaataatgaagatgaagaatttgaagctctacgaagagaacaaaatcattattgaagagaatgaaaagttacgcaaaagagctcttcttcttcatcaagaaaacaaagacttattcactcaaattattcaacaaatttctcaaccctctaataatcacaattagacccagctttcttgtacaaagtggtgatatcacaagcccgggcggtcttctagggataacagggtaattatatccctctagatcacaagcccgggcggtcttctacgatgattgagtaataatgtgtcacgcatcaccatgggtggcagtgtcagtgtgagcaatgacctgaatgaacaattgaaatgaaaagaaaaaaagtactccatctgttccaaattaaaattggttttaaccttttaataggtttatacaataattgatatatgttttctgtatatgtctaatttgttatcatcc

1-76. (canceled)

77. A method for enhancing yield-related traits in a plant relative to a control plant, comprising modulating expression in a plant of a nucleic acid selected from the group consisting of:
(a) a nucleic acid encoding an OsRSZ33 RRM polypeptide, wherein said OsRSZ33 RRM polypeptide comprises from N- to C-terminus an RRM domain and two Zinc Knuckles;
(b) a nucleic acid encoding a growth-related protein (GRP) having at least 25% sequence identity to the amino acid sequence of SEQ ID NO: 251; and
(c) a nucleic acid encoding a ZPR polypeptide, wherein said ZPR polypeptide comprises a Leucine Zipper (ZIP) domain that is six heptads in length.

78. The method of claim 77, wherein the OsRSZ33 RRM polypeptide comprises one or more of motifs 1 to 3 (SEQ ID NO: 241 to 246).

79. The method of claim 77, wherein the growth-related protein has a motif having at least 70% sequence identity to motif 7: [NHPS][SC][CR][RK]K[NK][VST][PD][GD][TAV][ST]F[VL][SE]DL[RK]DH[IM][HD]EFI[NH]AS[ASM]DEH[MRK][TH]CF[TK][KN]T[IL][K Q][KR]MF[GD]MS[KM][TAV]V[AT] (SEQ ID NO: 742).

80. The method of claim 77, wherein the ZPR polypeptide comprises one or more of the following motifs:

| (SEQ ID NO: 929) | | |
|---|---|---|
| (i) | Motif 8: | II[EK]ENE[KR]LR[KE][KR]A[LS][LA]L[HR][QR]EN, |
| (SEQ ID NO: 930) | | |
| (ii) | Motif 9: | [EI]M[EK][MI]KNLKLY[EML]EN[KQ][SCI], |
| (SEQ ID NO: 931) | | |
| (iii) | Motif 10: | [QKL][AD]L[LF][ST][QE][LI][QI][KQ][KQ][LI]SxPx. |

81. The method of claim 80, wherein the Leucine Zipper domain is located in the central to C-terminal region of said ZPR polypeptide.

82. The method of claim 77, wherein the ZPR polypeptide further comprises one or more of the following motifs:

| (SEQ ID NO: 932) | | |
|---|---|---|
| (i) | Motif 11: | K[VL][KA]K[EI]M[EK]MKNLKLY[MEL]EN[QKR][SIC]I[IL]EENE |
| | | [KR]LR[KE][KRQ]A[LS][LA]L[HR][QR]EN[LKQ][AD]L[LF][STQ][QI][LI][QI][KQ |
| | | N][KQ][IF]S, |
| (SEQ ID NO: 933) | | |
| (ii) | Motif 12: | MC[HS][AG][SI]Sx[HS][LS][ES]S, |
| (SEQ ID NO: 934) | | |
| (iii) | Motif 13: | [VI][HS][RV]L[NK][LR]RR. |

83. The method of claim 77, wherein the modulated expression is effected by:
(a) introducing and expressing in a plant a nucleic acid encoding an OsRSZ33 RRM polypeptide;
(b) introducing and expressing in a plant a nucleic acid encoding a growth-related protein in a plant; or
(c) introducing and expressing in a plant a nucleic acid encoding a ZPR polypeptide.

84. The method of claim 77, wherein the nucleic acid encoding an OsRSZ33 RRM polypeptide encodes any one of the proteins listed in Table A or is a portion of such a nucleic acid, or a nucleic acid capable of hybridising with such a nucleic acid;
or wherein the nucleic acid encoding a GRP encodes any one of the polypeptides listed in Table F or is a portion of such a nucleic acid, or a nucleic acid capable of hybridising with such a nucleic acid;
or wherein the nucleic acid encoding a ZPR polypeptide encodes any one of the polypeptides listed in Table J or is a portion of such a nucleic acid, or a nucleic acid capable of hybridising with such a nucleic acid.

85. The method of claim 77, wherein the nucleic acid sequence encoding an OsRSZ33 RRM polypeptide encodes an orthologue or paralogue of any of the proteins given in Table A;
or wherein the nucleic acid encoding a GRP encodes an orthologue or paralogue of any of the polypeptides given in Table F;
or wherein the nucleic acid sequence encoding a ZPR polypeptide encodes an orthologue or paralogue of any of the polypeptides given in Table J.

86. The method of claim 77, wherein the nucleic acid encoding a GRP encodes the polypeptide of SEQ ID NO: 251.

87. The method of claim 77, wherein the nucleic acid encoding a ZPR polypeptide encodes the polypeptide of SEQ ID NO: 747 or a homologue thereof.

88. The method of claim 77, wherein the enhanced yield-related traits obtained by modulating expression of a nucleic acid encoding an OsRSZ33 RRM polypeptide comprise increased yield and/or early vigour relative to a control plant;
or wherein the enhanced yield-related traits obtained by modulating expression of a nucleic acid encoding a growth-related protein (GRP) comprise increased yield relative to a control plant;
or wherein the enhanced yield-related traits obtained by modulating expression of a nucleic acid encoding a ZPR polypeptide comprise increased yield relative to a control plant, and preferably increased seed yield relative to a control plant.

89. The method of claim 88, wherein the increased yield obtained by modulating expression of a nucleic acid encoding a growth-related protein (GRP) comprises increased seed yield relative to a control plant, and preferably said increased seed yield is selected from any one or more of:
(i) increased harvest index;
(ii) increased total seed weight;
(iii) increased number of filled seeds; and
(iv) increased thousand kernel weight.

90. The method of claim 88, wherein the enhanced yield-related trait obtained by modulating expression of a nucleic acid encoding a growth-related protein (GRP) comprises increased biomass, and preferably increased aboveground biomass, relative to a control plant.

91. The method of claim 77, wherein the enhanced yield-related traits are obtained under non-stress conditions.

92. The method of claim 77, wherein the enhanced yield-related traits obtained by modulating expression in a plant of a nucleic acid encoding a growth-related protein (GRP) are obtained under conditions of drought stress, salt stress or nitrogen deficiency;
or wherein the enhanced yield-related traits obtained by modulating expression in a plant of a nucleic acid encoding a ZPR polypeptide are obtained under conditions of drought stress, salt stress or nitrogen deficiency.

93. The method of claim 83, wherein the nucleic acid encoding an OsRSZ33 RRM polypeptide is operably linked to a constitutive promoter, a GOS2 promoter, or a GOS2 promoter from rice;
or wherein the nucleic acid encoding a growth-related protein (GRP) is operably linked to a constitutive promoter, a medium strength constitutive promoter, a plant promoter, a GOS2 promoter, or a GOS2 promoter from rice;
or wherein the nucleic acid encoding a ZPR polypeptide is operably linked to a constitutive promoter, a medium strength constitutive promoter, a plant promoter, a GOS2 promoter, or a GOS2 promoter from rice.

94. The method of claim 77, wherein the nucleic acid encoding an OsRSZ33 RRM polypeptide is of plant origin, from a monocotyledonous plant, from the family Poaceae, from the genus Oryza, or from Oryza sativa;
or wherein the nucleic acid encoding a GRP is of plant origin, from a monocotyledonous plant, from the family Poaceae, from the genus Oryza, or from Oryza sativa;
or wherein the nucleic acid encoding a ZPR polypeptide is of plant origin, from a dicotyledonous plant, from the family Solanaceae, from the genus Solanum, or from Solanum lycopersicum.

95. A plant, plant cell or plant part, including seeds, obtained by the method of claim 77, wherein said plant, plant cell or plant part comprises:
(i) a recombinant nucleic acid encoding the OsRSZ33 RRM polypeptide;
(ii) a recombinant nucleic acid encoding the GRP; or
(iii) a recombinant nucleic acid encoding the ZPR polypeptide.

96. A construct comprising:
(i) the nucleic acid encoding an OsRSZ33 RRM polypeptide, a GRP, or a ZPR polypeptide as defined in claim 77;
(ii) one or more control sequences capable of driving expression of the nucleic acid sequence of (i); and optionally
(iii) a transcription termination sequence.

97. The construct of claim 96, wherein one of the control sequences capable of driving expression of the nucleic acid encoding an OsRSZ33 RRM polypeptide of (i) is a constitutive promoter, a GOS2 promoter, or a GOS2 promoter from rice;
or wherein one of the control sequences capable of driving expression of the nucleic acid encoding a GRP of (i) is a constitutive promoter, a medium strength constitutive promoter, a plant promoter, a GOS2 promoter, or a GOS2 promoter from rice;
or wherein one of the control sequences capable of driving expression of the nucleic acid encoding a ZPR polypeptide of (i) is a constitutive promoter, a medium strength constitutive promoter, a plant promoter, a GOS2 promoter, or a GOS2 promoter from rice.

98. A method for making a plant having enhanced yield-related traits relative to a control plant, comprising utilizing the construct of claim 96,
wherein the nucleic acid encodes an OsRSZ33 RRM polypeptide and the plant has increased yield, particularly increased biomass and/or increased seed yield, relative to a control plant;
or wherein the nucleic acid encodes a GRP and the plant has enhanced yield-related traits relative to a control plant;
or wherein the nucleic acid encodes a ZPR polypeptide and the plant has enhanced yield-related traits, preferably increased yield or increased seed yield, relative to a control plant.

99. A plant, plant cell or plant part transformed with the construct of claim 96.

100. A method for the production of a transgenic plant having enhanced yield-related traits or increased yield, particularly increased biomass and/or increased seed yield, relative to a control plant, comprising:
(i) introducing and expressing in a plant a nucleic acid encoding an OsRSZ33 RRM polypeptide, a GRP, or a ZPR polypeptide as defined in claim 77, or a genetic construct comprising said nucleic acid; and
(ii) cultivating the plant under conditions promoting plant growth and development.

101. The method of claim 100, wherein the enhanced yield-related traits obtained upon modulating expression in a plant of a nucleic acid encoding a GRP comprise increased yield relative to a control plant.

102. A transgenic plant or a transgenic plant cell derived from said transgenic plant, wherein:
said transgenic plant has increased yield, particularly increased biomass and/or increased seed yield, relative to a control plant resulting from modulated expression of a nucleic acid encoding an OsRSZ33 RRM polypeptide as defined in claim 77;
(ii) said transgenic plant has enhanced yield-related traits or increased yield relative to a control plant resulting from modulated expression of a nucleic acid encoding a GRP as defined in claim 77; or
(iii) said transgenic plant has enhanced yield-related traits, preferably increased yield or increased seed yield, relative to a control plant resulting from modulated expression of a nucleic acid encoding a ZPR polypeptide as defined in claim 77.

103. The transgenic plant of claim 102, or a transgenic plant cell derived thereof, wherein said plant is a crop plant, such as beet or sugarbeet or alfalfa, or a monocot such as sugarcane, or a cereal, such as rice, maize, wheat, barley, millet, rye, triticale, sorghum emmer, spelt, secale, einkorn, teff, milo and oats

104. Harvestable parts of the transgenic plant of claim 102, wherein said harvestable parts are preferably shoot biomass and/or seeds.

105. Products derived from the transgenic plant of claim 102 and/or from harvestable parts of said transgenic plant.

106. An isolated nucleic acid selected from the group consisting of:
(i) a nucleic acid comprising the nucleotide sequence of SEQ ID NO: 266, 286, 316, 374, 376, 380, 424, 456, 458, 460, 462, 648, 650, 670 or 736;
(ii) the complement of a nucleic acid comprising the nucleotide sequence of SEQ ID NO: 266, 286, 316, 374, 376, 380, 424, 456, 458, 460, 462, 648, 650, 670 or 736;
(iii) a nucleic acid encoding a polypeptide comprising the amino acid sequence of SEQ ID NO: 267, 287, 317, 375, 377, 381, 425, 457, 459, 461, 463, 649, 651, 671 or 737, preferably as a result of the degeneracy of the genetic code, said nucleic acid can be derived from the amino acid sequence of SEQ ID NO: 267, 287, 317, 375, 377, 381, 425, 457, 459, 461, 463, 649, 651, 671 or 737, and further preferably confers enhanced yield-related traits relative to control plants;
(iv) a nucleic acid having at least 25%, 26%, 27%, 28%, 29%, 30%, 31%, 32%, 33%, 34%, 35%, 36%, 37%, 38%, 39%, 40%, 41%, 42%, 43%, 44%, 45%, 46%, 47%, 48%, 49%, 50%, 51%, 52%, 53%, 54%, 55%, 56%, 57%, 58%, 59%, 60%, 61%, 62%, 63%, 64%, 65%, 66%, 67%, 68%, 69%, 70%, 71%, 72%, 73%, 74%, 75%, 76%, 77%, 78%, 79%, 80%, 81%, 82%, 83%, 84%, 85%, 86%, 87%, 88%, 89%, 90%, 91%, 92%, 93%, 94%, 95%, 96%, 97%, 98% or 99% sequence identity with any of the nucleotide sequences of SEQ ID NO: 266, 286, 316, 374, 376, 380, 424, 456, 458, 460, 462, 648, 650, 670 and 736, or any of the other nucleic acid sequences in Table F, and further preferably conferring enhanced yield-related traits relative to control plants;
(v) a nucleic acid which hybridizes with any of the nucleic acids of (i) to (iv) under stringent hybridization conditions and preferably confers enhanced yield-related traits relative to control plants; and
(vi) a nucleic acid encoding a polypeptide having at least 25%, 26%, 27%, 28%, 29%, 30%, 31%, 32%, 33%, 34%, 35%, 36%, 37%, 38%, 39%, 40%, 41%, 42%, 43%, 44%, 45%, 46%, 47%, 48%, 49%, 50%, 51%, 52%, 53%, 54%, 55%, 56%, 57%, 58%, 59%, 60%, 61%, 62%, 63%, 64%, 65%, 66%, 67%, 68%, 69%, 70%, 71%, 72%, 73%, 74%, 75%, 76%, 77%, 78%, 79%, 80%, 81%, 82%, 83%, 84%, 85%, 86%, 87%, 88%, 89%, 90%, 91%, 92%, 93%, 94%, 95%, 96%, 97%, 98% or 99% sequence identity to any of the amino acid sequences of SEQ ID NO: 267, 287, 317, 375, 377, 381, 425, 457, 549, 461, 463, 649, 651, 671 and 737, and any of the other amino acid sequences in Table F, and preferably conferring enhanced yield-related traits relative to control plants.

107. An isolated polypeptide comprising:
(i) the amino acid sequence of SEQ ID NO: 267, 287, 317, 375, 377, 381, 425, 457, 459, 461, 463, 649, 651, 671 or 737;
(ii) an amino acid sequence having at least 25%, 26%, 27%, 28%, 29%, 30%, 31%, 32%, 33%, 34%, 35%, 36%, 37%, 38%, 39%, 40%, 41%, 42%, 43%, 44%, 45%, 46%, 47%, 48%, 49%, 50%, 51%, 52%, 53%, 54%, 55%, 56%, 57%, 58%, 59%, 60%, 61%, 62%, 63%, 64%, 65%, 66%, 67%, 68%, 69%, 70%, 71%, 72%, 73%, 74%, 75%, 76%, 77%, 78%, 79%, 80%, 81%, 82%, 83%, 84%, 85%, 86%, 87%, 88%, 89%, 90%, 91%, 92%, 93%, 94%, 95%, 96%, 97%, 98% or 99% sequence identity to any of the amino acid sequences of SEQ ID NO: 267, 287, 317, 375, 377, 381, 425, 457, 459, 461, 463, 649, 651, 671 and 737, and any of the other amino acid sequences in Table F, and preferably conferring enhanced yield-related traits relative to control plants; or
(iii) derivatives of any of the amino acid sequences of (i) or (ii) above.

108. An isolated nucleic acid selected from the group consisting of:
(i) a nucleic acid comprising the nucleotide sequence of SEQ ID NO: 748, 790, 792, 862, 864, 870, 878, 902, 912 or 918;
(ii) the complement of a nucleic acid comprising the nucleotide sequence of SEQ ID NO: 748, 790, 792, 862, 864, 870, 878, 902, 912 or 918;
(iii) a nucleic acid encoding a ZPR polypeptide having at least 50%, 51%, 52%, 53%, 54%, 55%, 56%, 57%, 58%, 59%, 60%, 61%, 62%, 63%, 64%, 65%, 66%, 67%, 68%, 69%, 70%, 71%, 72%, 73%, 74%, 75%, 76%, 77%, 78%, 79%, 80%, 81%, 82%, 83%, 84%, 85%, 86%, 87%, 88%, 89%, 90%, 91%, 92%, 93%, 94%, 95%, 96%, 97%, 98% or 99% sequence identity to the amino acid sequence of SEQ ID NO: 749, 791, 793, 863, 865 or 871; and additionally or alternatively comprising one or more motifs having at least 50%, 55%, 60%, 65%, 70%, 75%, 80%, 85%, 90%, 95%, 96%, 97%, 98%, 99% or more sequence identity to any one or more of motifs 1 to 6 as given in SEQ ID NO: 929 to SEQ ID NO: 934, and further preferably conferring enhanced yield-related traits relative to control plants;
(iv) a nucleic acid encoding a ZPR polypeptide having at least 50%, 51%, 52%, 53%, 54%, 55%, 56%, 57%, 58%, 59%, 60%, 61%, 62%, 63%, 64%, 65%, 66%, 67%, 68%, 69%, 70%, 71%, 72%, 73%, 74%, 75%, 76%, 77%, 78%, 79%, 80%, 81%, 82%, 83%, 84%, 85%, 86%, 87%, 88%, 89%, 90%, 91%, 92%, 93%, 94%, 95%, 96%, 97%, 98% or 99% sequence identity to the amino acid sequence of SEQ ID NO: 878, 902, 912 or 918; and additionally or alternatively comprising one or more motifs having at least 50%, 55%, 60%, 65%, 70%, 75%, 80%, 85%, 90%, 95%, 96%, 97%, 98%, 99% or more sequence identity to any one or more of motifs 8 to 10 as given in SEQ ID NO: 929 to SEQ ID NO: 931, and further preferably conferring enhanced yield-related traits relative to control plants; and
(v) a nucleic acid which hybridizes with any of the nucleic acid molecules of (i) to (iv) under high stringency hybridization conditions and preferably confers enhanced yield-related traits relative to control plants.

109. An isolated polypeptide comprising:
(i) the amino acid sequence of SEQ ID NO: 749, 791, 793, 863, 865, 871, 879, 903, 913 or 919;
(ii) an amino acid sequence having at least 25%, 26%, 27%, 28%, 29%, 30%, 31%, 32%, 33%, 34%, 35%, 36%, 37%, 38%, 39%, 40%, 41%, 42%, 43%, 44%, 45%, 46%, 47%, 48%, 49%, 50%, 51%, 52%, 53%, 54%, 55%, 56%, 57%, 58%, 59%, 60%, 61%, 62%, 63%, 64%, 65%, 66%, 67%, 68%, 69%, 70%, 71%, 72%, 73%, 74%, 75%, 76%, 77%, 78%, 79%, 80%, 81%, 82%, 83%, 84%, 85%, 86%, 87%, 88%, 89%, 90%, 91%, 92%, 93%, 94%, 95%, 96%, 97%, 98% or 99% sequence identity to the amino acid sequence of SEQ ID NO: 749, 791, 793, 863, 865 or 871; and additionally or alternatively comprising one or more motifs having in increasing order of preference at least 50%, 55%, 60%, 65%, 70%, 75%, 80%, 85%, 90%, 95%, 96%, 97%, 98%, 99% or more sequence identity to any one or more of motifs 8 to 13 given in SEQ ID NO: 929 to SEQ ID NO: 934, and further preferably conferring enhanced yield-related traits relative to control plants;
(iii) an amino acid sequence having at least 25%, 26%, 27%, 28%, 29%, 30%, 31%, 32%, 33%, 34%, 35%, 36%, 37%, 38%, 39%, 40%, 41%, 42%, 43%, 44%, 45%, 46%, 47%, 48%, 49%, 50%, 51%, 52%, 53%, 54%, 55%, 56%, 57%, 58%, 59%, 60%, 61%, 62%, 63%, 64%, 65%, 66%, 67%, 68%, 69%, 70%, 71%, 72%, 73%, 74%, 75%, 76%, 77%, 78%, 79%, 80%, 81%, 82%, 83%, 84%, 85%, 86%, 87%, 88%, 89%, 90%, 91%, 92%, 93%, 94%, 95%, 96%, 97%, 98% or 99% sequence identity to the amino acid sequence of SEQ ID NO: 879, 903, 913 or 919; and additionally or alternatively comprising one or more motifs having at least 50%, 55%, 60%, 65%, 70%, 75%, 80%, 85%, 90%, 95%, 96%, 97%, 98%, 99% or more sequence identity to any one or more of motifs 8 to 10 given in SEQ ID NO: 929 to SEQ ID NO: 931, and further preferably conferring enhanced yield-related traits relative to control plants;
(iv) derivatives of any of the amino acid sequences of (i) to (iii) above.
